United States Patent Application Publication US 2009/0119022 A1 - sequence listing, part 14

SEQ ID NO: 27107 - DNA, 420 bp, Emericella nidulans
gcaaagcgtgcgacaataacaaccacgccagcgcacggcaggaccaaccacgaaaaagcacaaaaccaagaaggaccaagccccgaacgcacggaaaaaaccacgacaaaaaagaaagatccggaggacgagcagggtactcgaacacaggcaaacaacgaagcccacagacaagacgagaacaaaacctacagcaaaacaccagacgcctcgaacacactgatcacaaccgcgaacccccaaaaacgccaaaaaagggcaaaaccacaccaacgaaaccacatccccaagcagcacacgaacaccaacacactcctaacaaaacggagacccgacgcagccggaaacctgctccagaacgccacgacgccaaatatcccgaaaaccaacccaaaaattcaagcgaagaaccacagctga

SEQ ID NO: 27108 - DNA, 384 bp, Emericella nidulans
atggacgttcccgctattaaagcagctcgacccacgacgcggaagagccagattatcgaggaagaagaggacccagaggacgaatatgaagaagtggatgcgttcactgggactgaggaagaacccgcctctcctaccggcgtagtcagctcagagctctcagattccgatcatgcccacagccgcggccagcccgtcctggaacctgctcctgatcttgactcaagccctcttcggcctccgcgctcctcttcgctgagaacaacgtcacgagacccggttctcggctctgacgattctgaccaagctgcgttgaatgcctctccaaaatccgtcgtatctgggaagcgcagcttatattctggtgttgacgctgcgaaatag

SEQ ID NO: 27109 - DNA, 1030 bp, Emericella nidulans
atgaaagttaccataaccccagcgctcgttcttgcgctctcaaccctggccctcacggccccggttgagagggaggtgagaagcctagagagtatgtgcacacattagtagtggaatgacagaagatctaacgtctcggcagctcgtgatctcagtgttgatgcccgccatctgggcaagctgccggttgtcaagcacaaatttggcatcgagggcggtgtaaagggcggctttggattagggaagaagggaaaggaagatgataagaaggatgataaaaggggggtaaagggggatgatgacaagaaggacgatgatgattgggacgacgaccactgggacaatgacgactgggatgatgacaagaaagacgacaaaaaggacgatgacaagaaggacgacgataagaaagacgataatgggaattccggcggctttggattcggtgttgggtcgtctaacgggtttgactcaaagaatcccaagggcaagcctgactatgaccctcaccacgggaagggtcccgagggcaagcccggctacatcgtcgaccataaacatgacgacaagaaggatgacaagaacggcggtttccttcgtgcgaggggggagcccaagaaggacgatgacaagcacggcggctacaagccggacgacaagaaggacgatcacgatcacggctatggctacggcaagggggatgacaagtacgacgacaagtatgatgacaagaaggacgacaagaaggatgacaagggcaaaggcaagggattcggcttcggcttcggctttggagctggcgtccatggagggggcaaaggtggtggtaagggctttggatttggcctcggccacgggaaaggctatggacatggaaagggcgaggatgagggcaagggcaagggcggcggctttggcttcggtcttggcctagggctcggtggaaagggcagccacggtggtcacggcggatacggaggaggtgaaggcggcaatggcggaaacggaggcggattcggaggaggaggag

SEQ ID NO: 27110 - DNA, 309 bp, Emericella nidulans
atgccgctccccagcaacaaggccgcggacttgatacgtcgttattgtccgccggtggccgggcacaagaatgctgactttcaaacgcgagtgcgcggcatcgttgaccaggccggtgatcttcgcaatgagctggagaatagccagtttacagtgcatatcaaccctgcccttgtgcgtcttgagcaagacccgtatctctcacctacggtcgtcattttcacaagcttcggctttgctgagtccctcgggtattgcaacgtgcccggaacgcatccagaggctaactccagggatgctgctgtgtaa

SEQ ID NO: 27111 - DNA, 474 bp, Emericella nidulans
atgaaactccagtcttgcgcatatctaggatggggccttgcccttgcggcctcatctgccgttgcgctatcagtgcgcaacaccaacaaagctccctcgcaaagcgtgcgtgaacgagcaagtctcaatcaccaatggaaattctggcactccgagcagatcccagacaatattgtctacgaccttcgtcccgacgcgaacgattccagttttcaagtattaaagtcctgggtcctgcccgttggcaacgactatatcaagaacgccaatgcacaacatgaacgcccatctaccgaaccggatggcgacattccatatgtgcataatgattttgacgacagtagttgggatgtcgtgcgtctgcctcatgactgggctatcactagaccattttatacagacgacgaccccgagataccttcagctatgggtcgacttccagtgcagggggtggggtggtatcggcgcaactga

SEQ ID NO: 27112 - DNA, 513 bp, Emericella nidulans
atggaacgcccggcctttctcctcccaacggcgacctcccatcccacaaagccaaacacccggatcccacctatccttgccgccggcaaagcgactagcttaagtcccaactctacaacggcggccgaaccccccttctcccgcatcgcaaccatctccaggcaaaaactctccgctgaggcagccaggggcgacccagatctccgtcgatgtctcggccaccaccgtctccttgcgcggtctctatatgaggccaagcagggtatgaagcggtatctcgaggaggtgctggagagtgaaagcgaagatgatgaggatatctatggggagtacgagtttggaaagggagaggtcttgctccaggaggatgagcttgttgacgatgaagacgatgacgatgacgatgaactctacgatgatgacctcgaggatgaggatgatgatgaagatattgatgacgaatgtccgacagtggaagaagaggaggttgtcgctccccctgcctctataact

SEQ ID NO: 27113 - DNA, 279 bp, Emericella nidulans
atgtgcgctgggctagcaagctgcccaccgcacacggggcaactctcactccaccgccacacccaagccgagatctactacatcacatcaggccgtgggatcgtgaacattgagggcttccagcacgaagtctctgcggggagtgtccttttcatccccggggacgcggagcacggcgtcgtgaatcgcggagaagagacgcttgagtggttctatgttttccccacagctgggttcggggatattgtttatcggttttctggtaaggagtggtggtag

SEQ ID NO: 27114 - DNA, 450 bp, Emericella nidulans
atgccctccgccagcgcccatacagcgtccgtgtcccataatcaagactctggtccgcctcccggcgccatgaatgccaatgtcagcgccagcaaccgcaacgttatctaccccggtcaatctggcggcagcggcggtcacagccgccgctcgtccaccaccgtcgaagactattcgcgcatcatgctcgagtacacccaacgccgcatggccgggtttgcagatcgccccggtgacagcggcagaaggtcagccactagccgcagcagcaggagcagtaacaccagtggccagagcggcacttcgatgagcggcttcctagcaggacaagcaacgggcccgggccctggatctggctctggctctgcactgactggccgcacccattctccggctgattctaagatccgccatgttgactttggcgcgggggtctcggatggcgaatag

SEQ ID NO: 27115 - DNA, 282 bp, Emericella nidulans
tatcctgcacagcgcaggatgagaggggagttaagacccgttcagctgccgaggccgttggtccgtatttactcctgatccatacgccttgtggattggcaccacctatttgatccttagcagcaaagacctacgggtgatgtgggctattcatccttctaaaacctaggctgtaccgcacggaagtgtatgtgagcagtcctctaagtaccaaccgtacgatgctcaatttcaaggccgccaacgttggtattcagaccatcgagtgctcagacgccttaa

SEQ ID NO: 27116 - DNA, 256 bp, Emericella nidulans
atggctcacctccaagcccgccagcacatctccccagactccgggttccctgtaactttgcaccccctcttcaaccccggaatctcctcgcatgttcctcctgaaccaatccgagacgagattacaccgcccccggaccgcgcctctttcgcagatccagagaaacgtgctttgttctctcctggtgtcaagcggatcaatctcactgagagtatcggcacggtcctggagggagtccagattagccagcttagtg

SEQ ID NO: 27117 - DNA, 242 bp, Emericella nidulans
accgtactttgaccaagaaataccgctctgccgaggagattgcttctgacatccgcgagtacgaatcgcaaccagatgtagaagatgtgggcgttgtcgaggtggaacattggactatcactggggcgacagcttgtccgaaagagaagacgcttcggcagcgggagaaatacttttctgcagtccatttcatgtcgctagaagaaatgctcagtttggctgaaagccagggccatgtctag

SEQ ID NO: 27118 - DNA, 1221 bp, Emericella nidulans
gcctcaacgggtcttgaaaatgaccctttagcacagaaaatcgacgcccttggttctaatccacgaccgctcggcctcccccccgttctggcgcccggcgtaaagctggaccccaaatcgatctgtcatcctggcctcgagaccctctacatcggcttcttcggcacgagaaattatcacagagccgtcgttcgcagactcgcccataaacttgaaatcggcagtgctatcgtgaaccgccctctgacgcaggacgagctggacttctacgttgaaaccattagccaagctacatccaataatcgctggggcctgatcactggcgttgagtttggaatgctaacaggccttgttctcggacaaaggaagaaagagttccagcagtatgcgccgccgctcgatgcgaatagaccggccatcttcactcggtatgtcgagacactcaaggcaatgcgcgtggcggacccggctgttttccagcggactataatatcactttgtaaaacgactttcgttggcgggctctgtgggtggtttgttggatcggcttacgcgatgtctcgcagcgcagcggctgcgtcgactgatccgcggataaaacaacatcgggaggagttcatgaaggtggatcaaagggtagcggagaggagacgtcgcgctgctatggttgcgcgtgttcaaggggctcagggcaagttagaagacgatctatacaaccaagagggtctataccagggcgggtttgaggagtcgtcttcgactaccgcttcacagccggcagatacgtccgcatcgccgacaatccaatctcagacttacccttcaaacactcccgccgagagccaaagtacgcctgcttggccaacacctcaccctgacacctacagctccagcgtaccgacatctggtcagaacaatgacagcacattcttcgacgacgacgccagcccaatcgcaccggattaccgagatacaaataccgccccacagggtagtgcctgggagcgcatccgacaacagaaccaaaatccgtcttacaacccgtctgtaactcaaccgcaataccaacgagcaccgcccgctgcagaggctacgggtaatgacagctatcgagagcgagagcgcgcccgagccgagtttgaccgtatgcttgaagcagagcgaaaccaacacagtgactcggacggcggatcgcgcggcgcgagtgggtggtggaagtag

SEQ ID NO: 27119 - DNA, 204 bp, Emericella nidulans
atgcccggggataacctgccccttcgtgatccgctgcagctgcttcagccgctgcgtgctccggaaccaggcaggatggtctcgagccagccatccctgagggatgccgtcaatccactgtcatcattagcttgtccgcggtctagtataaacacaagggtgaaggatggcgtacattctctagaacgtggcagtggtcactga

SEQ ID NO: 27120 - DNA, 219 bp, Emericella nidulans
atggccgaagcgcactactatgcgccagcgcagtggcaaagcttacgagcatatagatcggcttccaacatttcgtccggacgccttttccgtgctaagactgcacctcatcttgctgatgggtcgcagctcaagctctcggcgcttcacgaaacaacaccacatctggtgattttcaatttcgacggcgctattgtctctcacgcattgatctgctaa

SEQ ID NO: 27121 - DNA, 512 bp, Emericella nidulans
tatgagctcggcgagctgaccgaagctaaggtgtatcttgggtacaccggaaagcaaaacattgacaaccccgaggtcgagttccgctttggcaagcgagttgccacaacccccgagtggatggagaagggcggtcgtcgcgaggctaacctcgccttcatcaagctgaacaagccgtttagggaggttacaccgtatgactaccgggatacaccggaaagcgacatgatgaacatcggcgttgtgggctttgccggtgacctcaagaagaacggcgagcctggtgcaaccctgtacgagtgcttccaagacacgaagtggagtctagacaagtccaggtggcagatgctcgagtatcaaattgatccatatggaggtaggctattaagagcgccttgacaaagcctacgcatctaacaagtccaggcatgtccggtgctccagttctcgacgaagacatgaactgcattggcgtccacacctacggcggggaaaggaaatgcgccaccgtc

SEQ ID NO: 27122 - DNA, 312 bp, Emericella nidulans
atgcagcacaacccggggggggctgaccgcacaagacgcgatcgcaatcgcccacaccgttatgacacgcgacaggacaaacacataaaggggggaacaagcgcaggcccgggcacgacggccgccctcataatgcacgctgcgggaaagaaaaaggggaaggggaagaagcaagcagggcgcaggacaaaccgggcagcaggcaaggacccaaacacggatgaggcaagcgcagaaccgcacgaactgagagaggcaccaactggcgaacaggcaagccacaacccggaagaggaacgaccgccaagataa

SEQ ID NO: 27123 - DNA, 396 bp, Emericella nidulans
atgccgaagaagacgacggcatcgaagacgacaaaccccggctcctcaaaatctatcaccgtcacacttagatcagcgcgcaatcccttgctcgaaataactctgtctaacgtcccactggccacaacaaccgtgtcggacttgaaggacgccgtccgcgaacgtgttctcgaaaacaccacagaagctgacaacaaagtgcctctggagaagatcaagatcctcttcaagaagaagcccgtaacgggtactgggaagactgttgcggatgttgtgagtgatgccggagaagaggagttactggccggtggtaaggaggtagagtttggggttatgattataggaggggcaagggttattgagggccaaaaccaagcacagggagaggcgccttag

SEQ ID NO: 27124 - DNA, 273 bp, Emericella nidulans
gagctttcggctccctccgcccgcattatggtacgatcttcctgcatgctgcgagattgatgtagctgacataaacaggcttctactcaggatttccagccatccttcgattacatcaaggcccaggaacaactcttccttgaaaccagatcgttatcccatgctcgttccagatcggccatgtcggaaaccaccgagatcatcgactcagactacgatacagattcaagaaacgcaacgtccgatagctcgccctacagaagtgctgactcg

SEQ ID NO: 27125 - DNA, 511 bp, Emericella nidulans
atggccaagaagggaggcaaaggaaagaagggaaagaagagcggctctaccgctactgctgctgccgcgaccaacaaggccgccgagcctgtggctgctgcgtaagtcacacctgtgtacaatatttcaattcgcgcgaacttcattgtttgtgtgtttgcgtcatcgcagtcgtcgccgtccgaattcaaattggctgactttggatttttgcttttttcttgcagcgttcccgacacgtccgttgaagagaacgtcgcaaagagcgaaaccgaagttgagcaagctcctacagaaacggttgaggcgcccacttccacccctgctaccgctgccccggagaccaccaccgagaccgctacttctgcgccagaagctccaccgattgctgccgccgccactgagaacaaagacgaggttccagtccccgccgcaaaagatgctccgatagaggaggcggtggaagcggtaccgaaaaccgaggcaaaggaggatgagctgaaagagactg

SEQ ID NO: 27126 - DNA, 1217 bp, Emericella nidulans
atgtcctccttttcgctggacgactacctcgacgacctgtcggactacggcttcgattactccgactttggtcttgacgatgaggacttcgactactccgactacctgaacgatgatgacttcgactactccgactatggcctcgacgacgaagactttgattttgactactccgactatctcccctcatcgaccagctcggcttcataccctacctcgaccagctacgattggctgtccggtggtgacagcggtgatgatggcgacatcacgacccccagctcatctgactacgacatgaacctggacgggacccctcctaacggagagggcagcaccaacggcctgccctcaagcttgggcggcgcgttcgggtctgacttctccaaccagcaggtcagcgactcgtgcgtctcggaggtcgcattcaagaccacagcgccaaaggtagatctcgcatttgacgtgatcttccttgttctctttatcgcactcgctgtctttactgtaatccgcctcttcaagatcaagaggaacggtggcggcatggtgaattgggttctgtttccgatctctctattcttcactatcctgtaaggccctatttcagagtcaaaaagaggaacatgactgatttatacggtataggtacctcttcctcgacacgataactctcatcctctcagaatgcgtcatgatgcgcggcgacaaatactgggatgcccaaacagctgttcagtggttcagcaggctcgccatcttcctgctgattgtcatcatcatgctccccatctgccgcaagctccaacaaggaggcggcatattcgccactctgaccctggttcttcactctctctggatagccctcacaggcatcttcctcatcgtcagcctagcactcaccacccgcgtccgtgtcggcgaccgagacggcttcaaattggaaaaggcctccaatggcgtgacaatggcgtactccgttttcttgtttattgctgcgttgctggccctggtgaacatgggcattgcgctagtgaagaaggcgaatcttcggaagggagtatgtttcctcccctcttttggacaataaaccatagtacatgagctaatccgcttcgcgctacagcttaccctcattaccattccagttctcgccctctcaaccttgatccttaccctgattctgatgggcgggttcgcggacaatgtctacggta

SEQ ID NO: 27127 - DNA, 394 bp, Emericella nidulans
aaacgccgaaggaggcgtgggcctaatctgcgcctgccttccgtcactaaacatcctgatcgccaaggtgcgcaaccacagttaccgctcgaaatacggatactacgagcagcaaagcggagacgtgcagctgtccaaggtcaagggcggcacaaagaatggggcgtcggtaaatctgtcgcgtcgggatcccgaggagcaggactttgtgtcggatgagagcggcctgatcagccacgcgggagccgcgggggatgttgctgttgttgatcgtcatggagatccagctgggaggaggagtaaaggagggattcacaagacggtggatgtgcagcagacggtggaagttttggctggacgtgtgcaggcggggaagaagggttcaacgtactga

SEQ ID NO: 27128 - DNA, 264 bp, Emericella nidulans
atggcagtatgtcccgtgcctccatcccaatcaaacattcctacaaacccatgtaccaacgttcttgtccgtctctcagctgtcataactaacaccatatctgctctgccccagtcccagttcccatctggcacccgcgtccgctaccaagacgcacactacattgtcatcggcgccgcggagcgcggccgcgtcctcatccagaacgaggataacgcggaggatatcctgcgtgttgagccggatagtttagttaaagtctag

SEQ ID NO: 27129 - DNA, 363 bp, Emericella nidulans
ctccagaaagccacctgcacattccgctatcaacgacaatatgaagtctatccttcctgttattcttgctgttattgggtatgtcctgtttgctgaaaccgtcctacatagtaaggaaacgtagctaacaattatctcttagcttcgcggctcacggttcgtaattccgcttccccaagatttttgtcttctgctgcccttttatctaaccctaccatgaaacaggctacgccgtctcttgccagaaccaaggcggatcctgccacgatggagaccgtgactgccccgccggtactgagagcgtcttctgggacaccggctgtgcgagcgcattctggccgtgggaggaagatgacaagtgct

SEQ ID NO: 27130 - DNA, 210 bp, Emericella nidulans
atggagactgctcaggccgctggtgcccatggagcgcccggcctgaccggtgctgagcgccagcacgcatcggaatgcgaaccagtgaccgtaacattcactgcagggcaatggttctccgacaacccaccgaaagagcaagacacccgaccggaagagatcgccgcgcaacgctacatgagagagaagctcaatggggaactctattag

SEQ ID NO: 27131 - DNA, 297 bp, Emericella nidulans
atgccccgatacgcccaccgcacccagctcaccgactcggaagacgacttctcagagtcagactactctatgatggagggagcccgtaggcatgttaggagacgatccatttcccgcagtcgctatgggcctagtcacagcaacgcctatttaagcccgcacggcactctctacgaagacgtgcacatcaaacggtccgcctcgacgggtgcccgccgcgaccgcgagcggcaccgagagcgagatcgtgatcgtgaccgggaccgcgagcgagtggaccgcgtgcagccgtcgacc

SEQ ID NO: 27132 - DNA, 572 bp, Emericella nidulans
acctgtccgcaagcgtgacgagaagaccatccaggtcaggactccgatggcgttctccggctctcatatcgacaagcggtggtggggagcattcaaggactggctgaggaagctcgtatgtgtctctacccttcccccagggccccttctgatcggtttcctgaccacctatagactaccgtgaccaagtccagtattggcgtcatccccttaggcttcagccacacaatcaacctcttccgggcccagtggggatgccccggacagacctactcggccaacctgcggatggatctggaggcagacctcgcgatggacgcgacgtatgcctattacctctctgcgacctttatcccgcctggcaagccggaaacctttgcttactttggcatggagcccactgcctatctcgggcttcacattgaaggcaacgcccaaatgcagaccaccacgggcaggaagaagattatcgacacgctgtcctatcccggattggccgtgaaggggatcgcagccgttgggccgacgctggacatctacggagaggcgggtttcccccatcctacccattg

SEQ ID NO: 27133 - DNA, 207 bp, Emericella nidulans
atggacggtctgacatatctctgtgcgacgaggggattcctgctgggtacgcgggagcaatttcgggaattgaatgcccttattgacgagaagctcatcaagcccgtggtcgatgaccgggtttttgggtttgcggagataagggaggcctatgagtatctggagcagcagcggcatttctcaaaggttgttattgatattgattga

SEQ ID NO: 27134 - DNA, 484 bp, Emericella nidulans
atggacgctcctcgcatcgacatcgcctttgcggcactgtactttattgtgacgttggtgctcttgattttcgcctcggtgcgcatccgacggagcaagaaacaaggccagcatgtcgccggcgctggcttcctcaacctgtcaatcatcttcgcctggttgtaagtgtcttagtggtccgggggacaccgggccaccaccccgcgtgcttgcgtatatcgaggaaccttctaacaggattaacagcgcctatatcgtcactatcgtttacaccgttcttaccgaatgcgacgtctacagctatcgccacttgtaccatgcgtccgtgcttgagctctggctccgcgccgtctctgagtacctgttcctcgcggccatcctgatctacctcacgcgcaagctgcagacagatttcgggctagtgcagccggccattcacaccaaaaagaaaatctgggccgtcctgatcggtcgagtcctcatc

SEQ ID NO: 27135 - DNA, 279 bp, Emericella nidulans
atgcgcctggctcgtcggttcctgtccccgttgcgcaggtctcgcgaagacctgattcccagtcacgccgatcacccccgtcattatatttccatcattgggttccccctactcagtcacaatcaggtgccgcacccggaaaggctcaccaagaggcaccagctcatggtacctctcgtcgttcagagcaccatgcgtctccaggacgaaaaaggaaggcttccggtcctcaccagcctgccccagtaccgtcctctcgctcctctgaatcacttatag

SEQ ID NO: 27136 - DNA, 237 bp, Emericella nidulans
atgtacacctacactcccacttccaagttcctcgttctggctcctatccagtctgctccgcttgctgctaccaacgagcagaccgagacaaacatctcttcagtccgtgagcgttctgacagctcgtcgtccaccaccagcagcacccgactgagtcggggtgctgctgcccgcctcccagcgggattcctcttcctaggctacgaccaccccacggccctcagtcccggcctctga

SEQ ID NO: 27137 - DNA, 397 bp, Emericella nidulans
ccgtcgcggccgtgaaccaacaccagctgaggatgacaagcctgccacagaaccgattgaggaggctaaggacctggagcctcctcaacctgtagaaccggcctctacagcagagccagccaatgaggaaaaactggcggagcccaccggggaaccttctgtagcaaaaccagctgaagaagcgccagttttagtggcggctgaggagccacccgctgcagagtctggtgaagctgaggtttcagcccaagaacctgttgacgagcaagtgcctccctcaactacgactgaagaggaagcacccgccacaaatgctcaggagcccgagcccgcctcggcaccggccgaaggaacacctgttgcggaaactcctgctgttgaagtcgaagccgaacct

SEQ ID NO: 27138 - DNA, 1062 bp, Emericella nidulans
ccgagctccactgcgcaatccgacaaagaacgggcggtcacaccgaacgccatccttaccgaccccagtatatcgcttattctgaattttatgccgaacgagtaccacgaactctacacaatcgccgccctccaagccggcaagcacgttatggttgagacccccgtgagcttgagcatcccatccgcaaagcggatccttgatgcagagaaagatgcgccgaacggggcgcgcgtctttgtagcctgtgcaaggcggtacgcgccttgctttgaaagtgtgttcaagaaagaggtggcggagctagagaggatccattatgcgcggttgaggatgatcgccgggccgcatgttgcgcatacggcgacgagtctaagggttgtttcgagtgatgagcccgagctcgggaacggttctaaggagggggtccagggggagaaggagaaggaggaggaggacgaagatcgagcagcgcgcctccacgacctgatggaggaggtctttggtaaagaagaacaaccaaatcacgagcgcatcgccctcagtcgctttcttgcctcgctgggctgccacgacctcggtttgatgcgagacacactcggctatccagatgcgatctcaaatatctcggtgaatgagccattctactcagcgctgttccactacaatggcagcgttgccggtgcccggtacggccgacatccgtttacgctcatgtacgaaaccgggacggattgcgtaccgcgatgtgatgcgcagctggcggtgtatggacataacaaaactgtcactattcattatgacctgccgtatgcgcgggcacagccggttcgcgttgttgttgagagggcagatgagcgcggtgggttgatgcagacagagacggtgagtacctgggaggaggcttaccaggaagaattgaaggcgctgtatgcatacctcgttgaggggaagccggcaaagacaactgcgagagattcgttgcaagacatcaagctgtttcagacaatattcgaccagtacaataagcaatgtgggacgatccgcactccgcttggttag

SEQ ID NO: 27139 - DNA, 303 bp, Emericella nidulans
atggaagtacacctgcatgctaatatcatcagcacgatgtcgtcaaaaaccaacttcatgagcgccggaaaccagacccaacagtccggaaaccgttcgcaaacgggcgctagctcgaagtcacaaaaagatccgacctctggctggagtgtcgaggaaatgcttgagactggactcgatcagaacggcaacattgtctcggacgattattcctggattgacggccgtcgactaaataagggccaacacggcggccaagaggccgatgatgttgccgcttcgcttgatgagcatttcgcttaa

SEQ ID NO: 27140 - DNA, 286 bp, Emericella nidulans
gggcggcggcggccattacggtctgcacgaggcaatgtaagtggtgttcaggactggatctagaggggcataccgtgcgccccagcagggccatcggttgtggccatctgctttgtatctagaatactgttctcgcaagactcagtagctgtattcaaggaaacccctcgtctactgcagccgtggtgttattggcggaggaaatgtttaccgcgttggacaccgaccgatagacgcccagcggcggcgagcagcaacgggcgggagcgcgaaaggaaaggaggca

SEQ ID NO: 27141 - DNA, 475 bp, Emericella nidulans
ctaaacaagtcatgtggtcgtccaacaaagtgaggtgaggtgtaccaacacaatatatcaatcttgttacacttcaccaacagtttacctcacaaacagccccctaccttatcaagtcattccccaatcccctttcctacatttgcgatcagtatactacattactcaaggaaccaccccgaaagcaagatgtcccccacctcgcccgctataattgcagacccccaatccgcccctcaaaatcccaccgcgacctcgacctcggcctcgaattcgaacgccaacaccggccaagaccccgtctctgacacactcgacccgcgcaccctcgcaacatccgccttcactgcctctcttcactccctcggtcaaaactacaccagtgcgctcgtcgatcgagcccagaacctccactctaattcccaggctttgaagaaccaagaagcgcagctagcgcgacacactgagagcctgc

SEQ ID NO: 27142 - DNA, 384 bp, Emericella nidulans
atgaaggtctttaatgccatcttgatcctttatactctccttccctccctcgccatcgcgcaatcacccatagatgccgctctcgctcagttccagcaactaaacgaccggatcgacagcgcgcagcggtccatcaacgcctacaacggcggtgttttgcttgctctccccgttgcgaacagcctctacagcgcacacaccgctgcaacaacagcgcgtcagtcccttacagcactagatcccctttctccagaggatagccagcgtgcgctggacgcatacaacgaggttcatccgcggttacttgcaactctcgcggccggacgcgataaggttcacatgcttcacctctgtgtttcgtctctcacgtatatgatgggctaa

SEQ ID NO: 27143 - DNA, 557 bp, Emericella nidulans
actgcaactagcggtgccgaagatggtgattcatccaagcaatctgttgatatgttagctaacggatgacagtcgtcgacgatgcttctgaagatgagcaagaagatctcttcccagaatcgaggaaggaaggcccgagtgagacccgcgaaagcagaaaggaacgagatgagaggcttagaaagatgatggaagatgacggtgggttggtctcgaacattgtgcatcatcgaatactaatgagcgcagatgaagatgaagagatgatcgatgctacagagccgccaacagaatccgaaaccatagacaagccgccccccaagcaagaggacctcaaggttgaagccacggtcaaaggcggtcgtcgcagaggacggcggcaagtcatgaagaaagtagttaagaaggatagcgaaggctacctcggtgagtctatgctgctactcggagaaatgccggatttacctaatattttcccagtaactgtcgaggaaccgagctgggagtcattctcggaggatgagcctacaccaccaccgcccaagaaaaagccagga

SEQ ID NO: 27144 - DNA, 408 bp, Emericella nidulans
atgcatcacaatcggatgagcaaacttatatttcgcgcagagctaacatcaatcgtggctcaagcggccctcgactttgccaacggcatctgcggcggtgccggagtcagtgatctccctcagtccgccacctgtgctagcgatgcaaccagcaccacagccaccgtttcctctactgtcacgaacacagagaccactaccaccacggccgtcacttcctccgaaagtgatcagacttcgacagaagctgcctcctcgacctcggccgatacttctactcagacttcaacctcgactgaaactgagactccagctagctctgaggatactgacggtgcaacgcctctccggggcaagagtgtcggtgtccttgctggtattgttgccggcattgcattcgtgctctaa

SEQ ID NO: 27145 - DNA, 495 bp, Emericella nidulans
ggggtacttgaccgggcgtggcgcactctcggctcgtgcgttcggctggcgtatgacatgatcttgcatttagtgcatgttcaggggcccaggtatgctgccgctgccgtggatattgccagatggtgtagtgacgaggagcagcgtcgtgcctgcgtgggcgatctgggaaatggacgtctttgccaccaccattcgacgcacgcccactgcaatggactggtcgcaaattgagatcctgctgcccgtggatgacgagcattggttccagtgccagctgcaagagagctgcttcttcgaaccggatccgatacgccggtggaagatgctcgagagctgcggaaaccagtcgcccaaggcctggttcatcgtcatcaactcgttaatgaaagaggcgcacggactctcaagccctagagggatccccagtcggtcgcagtcggaccaggttgacgaagcccaccaccagctagagatcatcgccaatgcaatccg

SEQ ID NO: 27146 - DNA, 497 bp, Emericella nidulans
cgtacctaggatgacccagaccactatcccacacccctcggacgagaagcccccatcctttgtttccgtcaagccctctgagtgggatacaactgaaaagagggtgtaagtccctccttaccatagcatatcttggagcgtgcatgtactaacagtgcctgtatggttctagatccaaagtcccctgtactgtccacagctcctcccaaactccgaaccttgaccatgaattcaagcagccatacacccaggacataattcgcatgttgactgctgctctccatgaccttgcagatgagacaaagtgcataaaatgcacggttgagaagtcctctgctcttctaaccagccatttatgcgacatccaagccgcgaagaagactgggcagtggtcaaaggaggagaggaaggcactaaaggctgaagtgaagagctccttcaaacctgtgaagaaaactgtaaaggccttgtggaaagaggggaagcagcagaagtag

SEQ ID NO: 27147 - DNA, 2252 bp, Emericella nidulans
gtccacatctgctcaatcagatacattgtcaccgagaaccaagttcatcattgggctcgattacggtaccaccttctcttctgtctcctacatcaagttcgattcggccaggcctcctccgactctctttggagcgcaaatctgctccattaccgattggcccggtgtcgacagccgggcacgcaacattccagaagtcccgagcgagagttggtatctaggcgatcgattctactggggatatggcgctcgccaaggcgtcgttgcgatcgaagacaataatctaaactataaaaatcggatcattcagtatgcaaagcttcttcttccggggaaccaaaaagaaactcgaggcccgcgtgaagaactccggagaaccttggtaagggctcgcaaggatgaaacagaggcaatcaaggactatctgcgacagatcttgaagtatagcaaagaatttctcacagagagagaagaactcagtgaggagtgcgaggttgagctcgtcttctgcgttccggctggatggccggcaaaagcgatacgaacaatgcaggaaatcttgcttgatatagcacatgaactcaatattggtacccttgcaactccgtttgtcctcaatgagcccgaggccgctgcggcgtatatacttgaagcgtgctcagggaggaaaaggctgtcagtgagtgcttgatcctctacagagcatcctactgctaactgctacctgaaagacaggagaagtgtttatggtttgtgatgcaggtggtgggaccgtggtaagtgcattattttattttttttgtcatgcccggattaataacaggaatgctaggatgctatcacttacagagtctgccaacaacacccatttcgagtggaagaagttgttcctcctactggtacgaagttttccgtatatcgagactgaaaatttgacacaaaatataggaagcaactgcggatccagctatgcaaaccaaactctcaagcaccaggccatagagaaaatcaagagtacagcgtacgagtcactgaaaggcccttcttttgaatacattattgagcacgacatcatgaccgagtttgagtataaaatcaagagaggtttcaatccggcagatgggctggacggggacgaagttatagtcgtgcacgggcttgagaggaatgagcgtttgggatttggacacaacaccatgcgtattaaaaggttcgtcagttccagcgtatcgcatctgtcatactaagtgcagccgagtgcaaccacatgctgatctatttctaagacgagatattgcggcactatttcagagtagcttgaacggtataagcaaactcattcgccaggagaatcagtgcagcggcagccaagggcctcacggtcgaggtatatcacactgttctccgaaaatactattttggttgattaatccaaggcgaaaattgctgacaccacggatacagacaattctgttggttggaggtttctcagctgcccccatcctccgctctcatatagaaacagagttcgaagctttgaagattatatatccgcccaaggggctgtaagtctcagtatgcataaaagccgcgcctggcttacggacaatagtgatagcgccgtgacagtctcccacggagctgttttccgtgcgttcaacaaatctgacggccctaagcgtattgtgcagtcaaattttggtttccttcagttggaactctacagcacaagacaaccagctcatcgaggcgtttccccgatttttaacgccatagacggcaagaaatatgtacgtgttctggattgggtgatcaagaaggtatcagaattgttttcagagctgcaaccgcgataggtttaagactaacggggcgcagggactagttttgagcaagcagcaacagtttcggactcgaaactggcaggtcttcaaaatggaggaggagctcgtgatacatcagaaaatctgggtgtctgattttgacaacgcccaaaaccactaccgagtgaacgctccttgcaataaaggtattaatacacattcatgttcctctccaggcttctggcactggctacacatggctgaccctgaattattgcttggacaggcgcggaagtctttggtatcctgcagatagacctagagccagtgaaaaacgagggcctcctcgagcttagatcgggaccagaggggatgttctacgagatccactacgaactggcaatggaagttgacggaaggaacctggct

SEQ ID NO: 27148 - DNA, 294 bp, Emericella nidulans
atggctcattcccatgcgcgttctctaggggagctttcgacggcgcagctgacgcagccggcgcggacgctgttcgagacgccaaaagtctacaatctggtgaaggaattcgacgaggaaatgcaaaggttgagcgatgctttcttgaaacgccgcgaggagacattctatatatattcgctccatgacaaggaacgaaaacggatgcgatgtaggatagccgaactagaggccgaaattgaagagctgtatgtcaacgtggatctttgccatcttgccgccggtcaggactaa

SEQ ID NO: 27149 - DNA, 249 bp, Emericella nidulans
atgtacgtgatcatagtctgtgcgaccctaccgacccttccgcaagcttacgctgccatcttgcacaagcgcccatcctactacgactcctcgaactaccgcagcggcaagtcggagccaaagcacccattgatccgcctccagcgactgccagttgcctcgctattcgaaactgtcgctgcagaggaacgggtatcgagccaagagaatatcatcgacaaagttgggaaagacgggatgaggatttag

SEQ ID NO: 27150 - DNA, 567 bp, Emericella nidulans
agtcgccagtttacgaggactggccgtctccctgttcgccaaattggatagccgaggaactcacgccggacccttttttcatcgattaccttgctttacttgccaacgccagtccaggtaagttaagtaaacagacacttatactctatgcgcttattgataggcggttaaaaggctttgctggattaacggctcttcacgagatcgtacttctggatcccccaacgtcggtgacttcgttcctctcacgctcatcattgcatatggagaggaactttctgggtcagacgcctttacatctagcggttcacgatgtggaaacagtccgtctgcttgtccaaagtggccatgacatggacatccaggacaactacggtattacccctttaatgtatgctgcaggaatgggcaagacagacgtggttcgcttgctcatcgagcaaggggcgaaccctttcatccgcgataccagatgggaaaggaactttattgattatgcagctgcccgcaaccattggcgattgttaatggacattctagacacggttcaagacagctactcggaga

SEQ ID NO: 27151 - DNA, 480 bp, Emericella nidulans
gtaatagtcaaaaatcctgcaactactacccccaagcacgcccgcaagcgtgctgccgcccttgctgcgcttgttgctggagaggaagaagaggaagatgaggaggcggaggaggaggaggaggatgaagaggaggaagagaatgcccgctgctgcaaaggcaaagccccggccacctctgcccgcaagggggttcattttgccagtcatgacacccgtgaacatgcagatagggtcccgcgccgcgcccagcgcttacacaccatgctggccgtggcggcccgacaggcatctgccgccgctgctgcccaggaagctctcgcccagacgctgctcctggtagccgccgagtacgccgatgatgatggtttccaggggtttggtggagaggaagaggaggaaggagagggaggaggagatgaagatgagtctgagctctcctcactggatgaggagattctgactcttggcaggtcataa

SEQ ID NO: 27152 - DNA, 336 bp, Emericella nidulans
atgcttcacgacggccacgtccgctaccaaacaacagaaccatacccgccttctctcttcgatcttccctccgtacccgaatcatccgaccgcatcagactccgtggcttctatttccacccgtttatgcagatctgccgggccattacgacactgtcgccggacgagatggagcgcgcatctgcggaagtcgaggcgcagacctgtggctacgcaggcgctgttaattcaacaggcgactgtcgggctggacccggctatgtcgtggtactttgcacagaagaacccctttgcacattctgtgatacgtacgagggaggagtggatttcgcatag

SEQ ID NO: 27153 - DNA, 1108 bp, Emericella nidulans
cgtctgcggcggcggcggcgtaggcaccggcgtatgtagaccgggttcgagttgtatgtcatcagcattccttccttcattcccttcgttaatgtggtcacgcacaggtaaaggaatcctttacacaggtcaatgccaacattctgctgacgatgaggtacgtccttctcttcaagcccttcctcatctcctatctgtctctgcgcctaagtacaccaacctactaacatcgcgaaccatattccgcgaaaacagtgctgtctccaaagacgatgtgagacagatcgcggtaatggtttctgcaggaaccgtgataaccagacttgcgcgggcgagtatgtcgttgggaacgggtacgtcctcccaaagccatactctcttatatcaactatccaccctacacgagtgagtgttataagacactaaatagtctaactcgctactgcagcccgactacccgtgtgtcggaccggattatattgtctgctgtgtcgaatgggaagatatggtgaatgttacttctaattcatccccgagtacggatacgacgacaacaacaacaagaacgacgacaacgaactcacctacacctggcctcgaaacaggagcagatggcagtggcagtggtggtggcgatggcggactgtcagcgtcccagaagggagggatagcggggggaatagtgggtgctgttgcggttacaagtattatcttcttgctgtttttactccttcgaaggagaagaaagcagcagcaacacgggcaggaacaaccggtggttgaagaaagcgagggacgaagatctgattacactggagaggggaaaggaacggagagggagacaagtggacataatgtaggtggcggagaaaatgagataggggttgcgatgctggcgtcgagggagaaagccgagctggatgcttccggtcgggcgctgcatgagatggagtcaccgacggtaacgaagaacataaaggagattggtgggtatagggaattggatggcactccgctggcaattgctgagctggctgttcctgagactggtcctgaacatggacaaaatggacagaaggggaaaactgggcacgaacaagcgccttaa

SEQ ID NO: 27154 - DNA, 498 bp, Emericella nidulans
atgccgacccaccttggcccaccacagactacagggcccaccactgtcggacaggcacaattaccgcaccgcctacacttctcacaagaggaagagcaactggtagcgcaagctggtcatccgcccacagcactcagaacttgttctgagagtccaaggctagagaaagcttccgaagaactggtcagccatgttaggacttttgccgaggacgttgaacatcggatcaacgacctgatctctagttggagcctcaaacagaaagaactttctattcttcgagattctcataagaaagttatcctggagcgtgatgagctgaggggaaagcttaacgttgagataagagagaatgaaggatttaaaaaggagattgaagacctaaaggcagagctgaagctaatgaaagaggaaatgcggagggttgaggaggacaagaaaaaaattaccggtgtttacaggaccctcgaggagctgataagatatgcgaaggattag

SEQ ID NO: 27155 - DNA, 318 bp, Emericella nidulans
atgcctgggcctgacacagttttcaacgccatcggcctaggcttgatgggtatttccatgatccctctcgccgactcattcttcccgaaagtcgagccgaagtattccactctgcgcgtcgccgcaggcctctttgagccaggtgattccagcgctagcacaggaggcagcgtgccgggcgtcgccctctttgacgccgatagcaaccgtgttgggtttcagtccggcaagggccacggcaaaatcgaggaaggaaactacaaagacatttctgatcgcttccgatcaagagccagaacaccatcactccgattttga

SEQ ID NO: 27156 - DNA, 465 bp, Emericella nidulans
atgagtgcaattgattcgggaaaaccccaagagctgtttgtcgaagatgttcccacagaggaggagcgccagctcgatcgcgagactctcaaccgactcgacctgatcctgatgcccatgacactcattctgtatttgctggcctggctggaccgcgcgaatgtcggcaatgcccgagtggtacgtcgcgcctatatttcaaggacctgctggctgactgctggctgactgtctaggctggcttggataccgatctcaatctgagcgactaccagtataaagtcggtacgttcgcgcctcacccaacactgtttagataggctgtttgactggacagcgatcaccgttacgtatgttccttatatcctctcggagctgccctccaacctcgtcctgaagaaaattcgcaccccgcattctgcttccgaccctgtgcacgtgctgacggcttgtcacggtgcttga

SEQ ID NO: 27157 - DNA, 306 bp, Emericella nidulans
atgaagctcacttcggctcttctggcggtgttaccgtgtgccttcttcgcctcggctagtcaagagtcctacgtcggctgcttcagcactcctggctccttcgaaaatctcggcacatacgttttccaatcgatcggccactgcctcaaccaatgcaccaaggctgggtataatatcggggactatgcggctgtcaaggagaccgattgctattgtggagacgtcgatcccgcaaaggacgatctggtcgatgatgatcagtgtaccacgcagtgtccggggtatgcgccggatgtctgcgagtga

SEQ ID NO: 27158 - DNA, 276 bp, Emericella nidulans
atgaaccctaaacagaagacagcaattatcgtcgtcgcgcttgtcctggttcccattattctggtctgctgtgcattcgccctagcccttggctgcgccgagttttggagctctggtcgcttcactctcatcaaaccttggattagacggcaactggctactgtgcgaaaacaactcaagccagtaagatccgatgatcctcgtgctgtaaagcaggtcatcaatcgcaacaatactgcgaatacaggaactgccatgacagttgcggaggtctga

SEQ ID NO: 27159 - DNA, 387 bp, Emericella nidulans
atggagaagatccaagtccaggttacaaacgacggcaacagcaacgaccgcgtgaagcggttcagtaagctcgtcaccacaagcccgacatttcgccacgagatccttgagaatgacctcatgcacgaactcctccagcgcgtctttagcaagcccggcgagggcatgggctaccacttcaacgacacaatggtcatcgaagtgcaaccgggcgcccccgcgcagcgcctccaccgcgaccaggagctctacccgtggtggaactccatgggcccagatgctcccgagtgcctcgtcaacttcttctgcgccgtaactcctttcaccgtagagaacggcgccacccgtctcgtcccgggcagcaaccgttggccggagtcacgctga

SEQ ID NO: 27160 - DNA, 1247 bp, Emericella nidulans
atgaagctgtcatcccttgaactctccttcctcctcaccagctcggtcactgcagacttcctgacggcaaggtctctcaatcacgaccgtaatgtcgagctgggcgagctccaggacgtccaagacttctatgcaaccctggagcaatcctccttctgtaacacccagaacggttcgttcgtctgggaggacattaccgagtttgagaccctcgacgatatcgacaattctgcgctcgagcttgcgggcccgaacttggaccgtggacacagccttgtctcccgcgaggaccaatgcaccgaactcacgggtatcacgagaatgatctgcgacaatatgcctagccgctggaccttctgggcctttggcgggcccctgatcatttactatgccccaaggttaatgaccaactggctcaatgtaagttaagtcctcatggctaagcgagatacacaatctagaaaaacacctgggcggagactgacagtgacgctctgcaaaaggacatcgcggtcgcaatccaagcagggaggaacctgcgccgggtctggagagatggctcctcgggggccaacgggctgaccccccacgacgagctaagacggacactgaacatgaaagcccgcgaggatgctgtcgactaccacttttccctgccgtacctactcgacaggcagggcaggcctgaggccaatagttggagcctgtcgcggcgatccggcgacagcgagggtgtcgatctggccatgttgtctcacgactacgtcttcagcgagaccgaccaagtcctctgtacgtcactgtcattctaccacaccatacctacccaaaagggccgtggagtcgcctatatctttcaataggcccgtcctaactggtcctgtagctgactaactttcccctccgtaatatcagactacaaaggaacgagggggaccttttcgttcggcgtccccgagggtaaagacaagagcccttctcgcaacaacacgctcgagcttgaggcacgcgcgccgacacacgactacacgatcgtgatgtcggtcatcaagcgcagcactgccaataccattgccaagcccagctgcattgcgaagctgttgaagttccacattgaccgcagctcggagacgaaccgctttgcttgccgaccaattgataacaaaggcaagtggcacgcaacaatgcacctgatgatcaaccgcgggaagcgaaaccggggcactgcgcgcacctgctgcgactaa

SEQ ID NO: 27161 - DNA, 479 bp, Emericella nidulans
atggtacgcgcggcgtggaaaaagcttctgaacgacgcgtccgtccagaggtcatcccagactctgtccatcgttggggcagatgccttcatctatggcggagagctgcgacctcgagagcccgtagactctgcagtttaccgcatatcagtaggcagtggtaagagacacatgctctctggaatcatggagggtcgaatactgactcgatacagatggtggcgctgaagccctcctgtctacaatcgctggggtcccgaccagcccgccaccccgtgttggcagcgcgtctacaaccgttgctggtaagatctatatattctccggtcgtggtggaacagccatggcgcctatcgaagaggatggagcattttgggtcttcgaccctcttcctggtaacggcgtatggtcgccgatccaacccgttgatccccagccccgtacccctttgacgcagctccacgctcttacgagcatgg

SEQ ID NO: 27162 - DNA, 381 bp, Emericella nidulans
atgaacgaggatgcattacctgctatgcctagttgggaccacgccgttactcgtagagtcgaggatacaagtccccatccggagtcagtggaaatggaaccattaaacccggtaactcggccacctcatcgtacaccatcggcgcctaggtcaaacacaggcgggtatatgggaccgccacctattaggacagcagtgcagaacgaacacttcccggattctcacgcgcatggatacgatgatcataatccatacgactaccacgcccaaaacctaggtcgtggccatagtccttacgacaacagcccatatgaccagccgtacgcagatcactctccagttggtaactaccacgccatgccgttcccaccgcaggcctaa

SEQ ID NO: 27163 - DNA, 231 bp, Emericella nidulans
atgaaagaggagggtagaaaggataggagaagaaaggggagagagggcaggaagagaaggagggaagaggagaagtgggagagaagggaaatggagggggggggagaagaagagaaggaaggagatgaggaggggaggggagggaaaggagggcgggaaggaggaggaaagaggggaaagaggaggagtagagttggtggggaagggaagaggggggagaggagaaggtga

SEQ ID NO: 27164 - DNA, 276 bp, Emericella nidulans
atgcgtctctcaacgacagctatggcgctagccctcgcagcaacagcccaggccaaggtcgcggccgaatggctgcaagagaataacaaggcaggcgacccgccaccaactggcaaagtggacaagtatcagacggtggtgctcagcggtgctcgcgatgcatatgatagaagccagccgtcgagttgtccgaccatcatgatcgggacagccgtaccggacggggacaagaatgacgggtggaaagaactgtacatggtgattactcgcaaatag

SEQ ID NO: 27165 - DNA, 222 bp, Emericella nidulans
atgagttctggcgctggtaatgccaacgacgatgctgacctcaatgatgatcagacccaacaggatggaaaaggagctggtgatgctgtacctgtgaccccttctccttcaaagaagagaaaggtgggggccgcgaaggataaggagactcacatgaggactactcctaagagtacaccaaagggcaagggcaagggcaaggaaaaggttgcgcagagctaa

SEQ ID NO: 27166 - DNA, 408 bp, Emericella nidulans
atggtctcacgggtgcgcgacaaagcggccctgaaactccgcattgattgccagccattgatgagtattctgcagacggaccaccgggacgcgaacatttcacaggcggattttggatttgcgcggccgatcacttataggcatttgctagactttgtaacccccgggttgattatcatctacccgccgagagtgggcagtggtccgcacggggacgatgaggggtgcgagttctcaattgtttatgaacaggaactcgcccaaactcttattgacgaccctgagtggaatgcatactttgagttccgcggtattgacgcggttgatatttcttcgacactggaggtgccggagtatagatacccgtcccagcatctctatgttgatgggagtgatggctatatgtag

SEQ ID NO: 27167 - DNA, 372 bp, Emericella nidulans
atgcccctggttccctctagcaccccgcctcctttcttcttcgcctgccccctcctgtctccccacgtttctcccctcatatctcttattcctccgtccccctacctcctctactcctcctccactttccccctcaccttcttcttctcctcctccccactctcaccttccctccctatctaccacctcttcttctccccgcctctcctcctcctcttcaaaccctcactctctgttccctcccttctctctccctctcccactctccttcactcctccctctctcctttcctcctctatctctcctctaccctccttcctccctctcctctctcttacaaagccttccctccgctactgtctcgcctctag

SEQ ID NO: 27168 - DNA, 333 bp, Emericella nidulans
agccagagaaggaactgcttcagactttggcgaaacggatggttgtgcattggttacgagaggagacaccgcacaagttagctgtgtatgcgttttccttcattcttggtgtattaaagaaggtttgtccatctactatacacctttatcaagaacatattggactaacttacgcagataaaccgcgctgacgcaacccgaaaccctacttcagacaccgatgccgacccagaaaccgctgctccaaccctagaggacatcgccgagattgaagcgtggtcgctcaccctgcttgattgcaagaaagactccctctggcaggttcaagtggcc

SEQ ID NO: 27169 - DNA, 379 bp, Emericella nidulans
gaattgtggaaagaagcaattgggttcccgaaggggagaatgctacattttctctcaagcgccttcaaaaggccggtgcgcccgctgccagggcatcaggcaaggaattgcctgtcattgagagcgaaagcgaagagtccgagtccgaaacggaattcgatgatagcgatgatgagggggatcggttggagagagaacttgactcgttatatgagcagtatcaggaacgcaaagaagacaaggactcgaagttgcgagcgaagaaagctcggaaagactacgaggcggacgagtgggaaggattctctgactcggacaaagaaggaaacgatgacgaagaaggcgaagcaaaacccaacgttcaagataaccaccaatg

SEQ ID NO: 27170 - DNA, 609 bp, Emericella nidulans
atgtccacggggccgcccgtttggccggctcaggacgaacaagagtcacaaccccctgctgaaacccagacccgtgcccgacggtcgcgtagaaagaaggacgacgccgttgagaccgatcggaaggaacctacaaagtcggcgagatccagggataaggataaagacaaagagaaggacagggacaagggaaaggaccaagacaaggagaaagagacgaagcggcccagtcgccgcccgcgagacaagtcttcgtctacctccaacaaccctacttccacccagtcgaatccccgcaaaaagcccaagttagagggtacgccgccgaagcaaagccctgacgcggcccctgccgtttctgcagcagtctcgacagcttcagactcggccccagttcttgcgcacacgaccactgtttcggttcctactccgcggcctagtcccccaagtgcacctgcatcgcttccggcgaatcactctgagcttccacctcaaccgcagatgacccaatctcgtcatctcgatctgacctctcagttgattcacccttctcaatccgctactctccaagcttcggctcctacaacgtcgccgccatacccgatgatg

SEQ ID NO: 27171 - DNA, 593 bp, Emericella nidulans
cggaccctgcgacgtttctcgacggctacaaaacgaccgtagtcggcacgctggcgacggcccaggcggtcgtcctggcaaacaggaccgtcagcgccgacgaggacaagccagtcactttcatcaatctcaccacggccggcatcctcttcccgccgttccccggaatgggcgcctacgtaagcagcaagatggccgccgtcaagatcctagaggcgtttgccgccgagaacccgcatgtgcgtcttcacaatgtgcatcccggattcctcgagacggccatgtcggccaagctgggagagaaaatcaaactgccctacgcctacgatgacagtaagtcgaactgaccctgtttgcgttcaagtcactaatctctcgcagtctccctccctgccgacttcctggtctggactgcctccgccgaagccgaatttctcaggaacaagatcgtcttcgccgcgtgggacgtggatgagctcaaagcgcgtacaaaggagattgtcggtggcccgcccggaactggggagctcaggatcggcttccaaggcttccctcgatttatggcatgccagtcttttgccggcaccaactag

SEQ ID NO: 27172 - DNA, 288 bp, Emericella nidulans
atgggagtgttggccagccatagtgtgaattcagagtgtctgaactcccgccaccacttgtcagacggtagcatggtctccaccgagtttaataaggtgcccaaagatggggagagcacctggcatcatgggaaggttcgtgacatgcgggatgtcggtcgccacggtgaatttggaccggaggtagagggttgcgagcatgaaaaggagagcagcagagtagccatgcgtcaaagaaacggtgtcagccgtgaaatcgtagtcagtattcatagcggcagcgtctaa

SEQ ID NO: 27173 - DNA, 1019 bp, Emericella nidulans
atgagggtcaaccctttgctcctggccaccaccctgggtgtcatgagcggtgtccttgcggcacctgtcccgccctagttcagcgtggtgtagagttatctgggtcctttggcggtgaccatgactgggactggggccacggtggaggtggtcacggtggtcacggcggtcacggcggtcatggcggtcatgacgatgatgacgatgatgatcacgactgggagcctcccacaaccactccctgtgagacagagacggaaactcctccgccagagaccactccatgcgagacggaaactgagacgcctcctccagagaccactccatgtgagactgaaacggagactccttcaacggagtctcctccgccagagaccactccatgcgagacagagacacctcctccttcaactgagactcctcctccagagaccactccatgcgagacagagacgcctcctccttcaactgagactcctcctccagagaccactccatgtgagactgaaacggagactcctccttcgaccgaaactcctccacctgagactactccatgcgagacagagacgcctcctccttcaactgagactcctcccccagagacaactccatgcgagacagagacgcctcctccttccacagaaacaccccctccagagaccactccatgtgagacggaaacagagacgcctccaccagagaccgaaactcctccacctgagactaccccatgtgagacggaaacggagacgcctcccccagagaccgaaactcctccggaggaaactccggccccggctcccccgagtaccagctcctggaccacatctacatctgtcacgattcctcctgatgagacaaccacttcgattcccaccggaacatcacctgagcagcctacttcaactggcacaaccccagctgctccggtctttactggtgccgctagtgtggaccgttttggctcccctctcgctggtgtgatggccattgctgcaattgttcttgctttctga

SEQ ID NO: 27174 - DNA, 213 bp, Emericella nidulans
ggcctggtgcaggtattcacggtggacaggttgtttcagcagggacgccggctgaagtgatgcaagatgataattcattaacagggaagtatttaagcggtaaagagtttattccagttccacttgaaagacgtaaaggtgatggacgtaaagtagagattgtcggcgcaaaagagactaacttaaagaatgcgaaaatgtcattcccgcttg

SEQ ID NO: 27175 - DNA, 1515 bp, Emericella nidulans
gagttccctgaggcgtccatcttcccgctcctcaaggacaaagtcgccatcgtaaccggcggcgcccaggggatgggcaaagctacagcatccgtgttcctgcgcgcgggccgaaaggtcgtcattgccgacatcaaagctgagcagggcgagcaggttgcgtctgagctctcatcgctcggcgaagtgcgcttcgtcaagacagacatctccaagtcagaagatgtccagaacctggttgcccagactgtaggcttctttggccgattagatgtagcgatcaacaatgccgccatgactcccgataagacggtgctcattgagacagacgaggaatattggcgccgcctggtggacgtcaacctgacggggacggcgctctgctgcaaatacgagatgcagcagatgcgcaacagggttccaaggggtctattggtgaatgctgttgctcccggtgccatctttacggagatgtccgccaaagcactcgagattatgggcacgacacacgatgaatttgcaccgaaagttagcagtctgaaccgattcggccagcctcacgaggttgcgcaggcaagtctgtggcttgcgtcggacagctcgtccttcacagctctctattttaactttgatcctatcatgggcagtctttcaaatggcctcccggttcctcggacctacgagggcaagcttgccctcgtaactgggtccgcgcggagtatcggcgcctgtatcgtccgcaatctagccagcaaaggctgcaacgtgatcatgaactatgcgacgacctcctccgacaaagctgcggaatggctcgcccaagaactcaccgaaacacagcacatccgcgccctccctatccgtgccgacatctctaaggaagaggaatgcgagcggctcatatccaccgcgaaagagttctttaccggtgacggtgagagcagattccatattgatatcctcgtacacaacgccgccatcctgttcctcggcccgctcgagtccgtggacccggtcgagttccatcgcatctacgaagtcaacgtcctcggttcgattctgctgacagccgtctgcaagccgtacctgcctaccgaccggtcgggacgcattgtcatgctctcgagtataaactccaaggtcggagcggagaacacgacgctttattccgggaccaagggcactattgaagctatgacccgggtgtggtgccgagaactcgcagatcgtaccactgtcaacgccatcaaccccggcctcgccatgacggatatgtacctctccgcgccagatgaagtcaaagtggatctggcaaagtggaatccgttgaccccgttggttcccgtccgggagaccgacagcgaggaggtcaaaaagctgggcgagaagttcggcggacgagcagcctacgcggaggagatagcggggtttgtcgcgacaatctgtaacccagagtttggctggtgtactggcagtattatctctgctaaagagggtttgtccttcagtatctaa

SEQ ID NO: 27176 - DNA, 832 bp, Emericella nidulans
agagagaggggggaggggggagggggaggagaggaggaagaggggagaggaagagaaaggagaggagaggaagagaagtggaagtgaggaggagaagagaggggaggggagtgaaggagggaataagatagggagggagggggaaggggagagtagggagaggggggaggaggggaagagacgaggagaagagaggagaggaaagtggaaggggaggggaaggggggggggagggggggaggggataagggggggagaagaggggagagagagagggagcaaggaggaaggagagaagatggggggaggaaggagggggaggagaggagtggggaggggagggaaggagagggaggggaggggagaagagagagagagagaaagaggggaggggggaagaaggaagggagagggggggagggggaggagaggagggggggaaaagagagaagggggggggggaggaggaaggagaggggggagagcaggggggaagataggggagggggaagagagaggaggggagagggggagaagagaggaggggatggggagggggggaaggggggataggaagagaagagaagggagggggagggaggggggaagagggagaagaaggagggaagagagggaggggggggggaaaaggaggggagggaggggggaggagaaggaggggaggataggatgggaagggagggggcgagggggagcgaagcggcaaacgagaccctggaggccgttcggcgcgaagcaagagacatcgtattatctctctttgcacactcgccccgcctggtcgcgcgcgatgagcaccgtaacaatttaa

SEQ ID NO: 27177 - DNA, 324 bp, Emericella nidulans
atgtctgtcccacctacaattgcgagcctgtatgctgcccttgctttgttgctgttggtacgttcgcgtccaagagatgttcgatacctcttaaacaaaggatacatcctcaacgttttgacagaccatgcaaagtttgagagcacatctaacatcgagtctggtcaggataccggaggggagggtttctcggtatacgtggggagattcagctctctggcctacgcaacagatcaagttgatatgtctgaccttgagcacagagtccatcagcagaagcaggcactcattattatgactcaagattctaatcctaggcaataa

SEQ ID NO: 27178 - DNA, 1623 bp, Emericella nidulans
agctggcacaccactcctgaccacccgacccttgcgatggccaaaaagaagggcggcaataataagaagaagggtaacagcgccaaaagggctccggtaaacgacaacaactttctcaacccagaggtttccaaaccagtttccgacccggcggaatccgaggaacatggggtccccgatccagtatgcacagctccctcagtacagttatcaatctttcgatgataatcttcaatttcgttatcaaaccttcgaccgttatacggctcagttctcataccatcctgtctctgcggattatctgacggctaataatcaggacaacaaacccgatgccccggaagctgagaaggaccaggccccagtcccagatgctcctcagaaagatgaatcaagcagtgaaaacgcttcctcaccggaggcggaaggtatgccgcccaactgtatccagctaagcgtataatgctaagcgggatagcatcatcgggtgcgacgacacctcccgatacagtagaagagcctaaacccgaaggctcagaacctgaagcagagacgccagccgaagaggctgctccacaatctgctgaggaaaggccagctgaggaagcggccgagccggccgctgaaccgagcgaacaaacagataccgctcctgccgaccccgcggcggacgaggctcctactgaggagaagcctgcggaagagacagcggaaccagcgactgcagaaccggccgaagaccagtcacctgctgcgaaatctcctgaaactgaaaccacaacagagcccgaggcaacgcctgcgccaaccgaagaggccgcgcccgagccggctgcggaagcagaacagcctgctgccacggacgcagtagcagaagcacccgccccagaaaccgcaactgaagaaggcccggcgcccagtgaggagaaaaaggctgcaactgagacgaccgaggaacctgcggctgatactccacctgagtcatccgcggaggaactcaagcccactggcaagaaaaacaagaagaagaataagaagaaaaagaagaatggagtagaggagcctgagcctgagccgacaacaaaatccgaaccggcgacggagcctgaaccagcagcggaaccagaaccagcggagccagaaacgacagcgacaccggaagaaggagcagagcccgacgcagctacacagcctgaaccagcggcgccagaagcagcagagtcagaggcggcggcggagacagcaccagctacaaagcccgaagcagctacgcagcctgaaccagcggcgccagaagcagagccagaggcagcggcggaagctaagccaactacagagcctgaaacagtgctggaggcagcaccagcaccagccgccgagcccgagcttgagcccgttcaaaagacggaagagcctgcagctgctccagaggagctaaacgaagaatccacagcttcgtcgggaaagaaaaagaagaaggaaaagaagaagaagaagaagggcggagcaacacagtcacctccacctgagccctctgaaaacgagcagccggtggccaaatccgagccagcagcagagccggcagcagacgccgtagcagaaccgacagcagacgcagcagcg

SEQ ID NO: 27179 - DNA, 297 bp, Emericella nidulans
gtcgtggcggccgtggcggtcgtggaggacgccgtgacaacaaccgtgactggagggaacgacgcgacgcggaccaaaagcaaggcttcaagaacggccaggacgagcaacccgaacgtcgtgaggtccagaaggatgctcggtaagactaccaccaaacctcgctactcaaccaagaaatgctaacagttatagcggtgtgcctgtcgtgcagagcaccgccgacgcaggtcagaagcgtacccgtgaggacgaggcgagcgccgaacaccctgccaagaaggtcgacaccaagga

SEQ ID NO: 27180 - DNA, 361 bp, Emericella nidulans
atggccgatcgaccacgagtcatccttgagaagtcccgcaccgtccgccgtcggtaccaacgtagcaacaaacggtttcagttcacggcatctcagatagcccggatcgagcgagaagaagagcgtgaaatccaagcacagaagctccgggaaaaggagaagcgacgcatacagttaaagaagaagaaggcagagaaggaagcaaaagcccgcgaggaacgaattcgccgtggtattccggaccctaatgctcctgctgtacctgcgagtcagccattgttgttcaacttcatcaagagaacgccatctgttcagccggaaagcgaaagccctgaggagcagactagggccgatccctata

SEQ ID NO: 27181 - DNA, 401 bp, Emericella nidulans
ggatcacaaccggccctttccacgtggtttcggctcggggggttccttgcggccattctcatcttccagaggaacgggggtgaattcgatgtcggactagaggaactctcgctcggcaacgggatcacgattcttatcaaggattttgaagtgttgtatcgattgacgtagagggaggtaagcataatgctaacaacgatctgaggccaacaactgttaataccttgccgtatcaacacggggagacataacgcacgatcagctccagccacgtatgggaagaactggggcttccccagatcaatcttgtcggtcccattcaacgccattacgatggcttaggacagtcacagtcggcagaacagcgaaaattagcacgcgacccgaagatcaaaagatag

SEQ ID NO: 27182 - DNA, 479 bp, Emericella nidulans
atgcgcggtatgcgtacaatccccatgcttattgtatatctttggcttcaggattggtggggtgtattttgcctgctctcccttgttctcgcgcgactatgcaacatcctcgtcatccaacgccgatgccgcgaggcggggtggaaaggagctcccgagccaggcgttcaaggtgatctccttgtcctcctaagcggcgactgctgggtgcgtatccaaggcgcagtggacgacctgaaagccatcaccgcgggccagtggatgcgagaccggagcgtcggcgaagacgttgtatcggcagttgcaactcttctcgtatacgtcagcgcggtgctggtgtgcaatatcagtaagactgggcaggttttactgctttctgggatgattgtgtccgctgggctgttgtttttggccaatgctgcaactgccacaatgaacatgaacggcagggaaattcgggtcgtcaaggtttcgaagag

SEQ ID NO: 27183 - DNA, 264 bp, Emericella nidulans
atggagactatcaaggtaagcatgtaccacactaaactctctttatcttctttgttcccattcctaacagttgtcgctagaacactgtcaactacgtcaccgagtccatccagggcgccggcgcgacagcctcgaaggaggtgaacaaagacgtcgccaaggacaataacgccgacctgactacgcgcgccactgctgccaaggacgctctctttgacaagaaggatgagaaggttcatgagactcaggcagatgtttacaagg

SEQ ID NO: 27184 - DNA, 474 bp, Emericella nidulans
tggaacaacccgcacctgcttgtgctcgacgagcccactaacttcttggaccgcgactctctaggtggtcttgcggttgccattcgcgatttcaagggtggtgttgtcatgatttctcacaacgaagaattcgttggcgccctgtgccccgagcaaattcacattgccgacggcaagatcgttgctcgcacaaataccgccatctctctggatcgctttgaagacagcgcttcatccactccccagcccggcagcacggccgccagctccgtggccaacagcgccgccgcctcagccgtcaactccggcgccgaggaccagggcgagctcaagttcaaggccaggaagaagaagaagatgacccgtgcgcagctgaaagagcgtgaggctcggcgccgtcttcgccacattgaatggctcaacagtcctaagggaactcccaagcctcccgataccgatgatgaggctgaatag

SEQ ID NO: 27185 - DNA, 214 bp, Emericella nidulans
atggcgttcaatttcggtaaacagaactcctcgggggggtcaaatggtggattgtttggatccgctggaacgtcctcgaatactggttcaagcggcggtctctttggaaatgctggagcaaccacaggcggcacttcttcatcaccgtttggagccgcggccgcttccaatcagggctcgtctatattcggtgctggagctggtagcggcagca

SEQ ID NO: 27186 - DNA, 2645 bp, Emericella nidulans
atgttcgagtcggtctatactatcgttctccacggcaacgacggcaccgggaaatctactctcaccctcgccctcagggcggccggtgaggtcgtctatgctcgtggtgacgaagatcccgcactcgaagataccctcgtcgttaggtccttcgacagattcacgttacaacttgccgacgacgaccgtgtttctctccccgaatcgtacacggacagagatggagtacaccgcagaatcgtacggattatccttgatgcagacctccccgttcttcaagcgcggctcgcgaaccggccaagcacggacaagtgggagtccgaaaaagccctcttttacttccgcgcgcggttccttgtacgttctcctcatttcccctttcccattgcacaattttgacaggtcatcaggaattggccgcgttctacggtctgcccgtcgtggataccggaaagaagggagtcaacggaactgtctctgacatcattgctctcgcccgcaaccccaaggccctcgcggtattctccatgcttgccttgcgcacactgactcctaacgacatcgcttccttggccaggccccgtgcggtgatcccgggcgtggactacgcccagcggctggaggagatcatcgctattgagtgcggcgagacgtcaatcttcacgcccgaagacgtccgcgcccaatgccttcgagaccctggtctcgtgcatgcgctcgtgaatcactacgacaatttacatgatgcaaatgttccgctgcgccttcgtctggtcgtcgagggcgagtcgaagcaaatttacaaggtcgagacgcccctgacccgccactttgacaatcgcattctcgtcttcctcaagccgaccatttactcgcacagcaagcaggcgacggcggaaattgcaggtctcggcgcaatccgtgcagccggctcccgtctcttccttgagatgctccatcgcgcaggaatcagccatacgtacgacggcctgaacgtgcatgggctcatctgggcgcgcagcaccgagattacgcagatcgagaccgtgtacaaaggactctgcgcgggaacagacaggcactccttcttcggcatggtcaccgatcccaaagttacgctgccgacgggccagtataagcgcgggccatacgtccgcttcgactggcggaacccgaaccacacgtacaagggcattaatcctgcgacgcacccgttctaccatctcatggaagcgtccgtcggcaaggatgtcttctacgataactacctcactgggcgcgcaaagccgcttggggacaagtgtgtaccggaggagctcgtgcacggcgtgcaggacgtcgaggcgtccgtggactggacgatgcgcatcttcttcactatccaatactaccttcatcagatcgggctcgaggttcaggacggctgtgtcatgctcgatccgaccgggcgtacgatgtggtctgagatcaaccaggactgcatgcgcatcaagtggcgcgaggtcaccaatgcaaacggccaagacgcgttcgacaaggacgtctggcgcgcggggggcagctctgcagaagaggccatcctcgataagtggacccagctcaacagcctgctccacgcgcaccttgcgggccgcccattccacgagcacgagatggtcaccccgtgcgaaccatacggcctgcacgcgcgggaagtgctcgcggacaaaactcttacactcacgccgcggtaccgggcgctgtacgaacgtcttgccgcgcatgatcgctcacgcctgcggtcagagtccgcgtccgaggccacgtccgagcgtctgctcgcgctcatgcaggagcacatctggcagctcaccgccgccatctcacctcacaacgcgcatgaggaagcgaagacgatggtccgactcacgaacacgtacgcgcgccgagtcgggctggccccggcgcaagtgtgcgcactcactgactcggacgcggacgccgtcctcgcgcgaccagccacaccgattggctccaaggcgattggcgtgacagcgaacaagtatgcaggcaagacggacgtttttgcgctcgcggagctgggcgtcaagctcgtccgccccgagggccgctgcctgcgcgtcgactacgagattgtcgacgcagccaagttcaccaaagcgttcggcgagggcatgagcgtgcacttcgtgcctaccaggccaaaggacatgccgggcctcctcgtgcagggcatgctcgacggcgcggtgacttacagctcagtgatggacaatttcccgactgtcgcgcggctcgttgcttcagcgccagacacggacatttcgctcgcgctcattggccggcgtggtcggcagatcgacccgcgcgcgtggaccgcggataagcccgcgcgaatcgtggccgagcatgtgcgcatggtgcgaacattctttgctggcctcggcgtcccaccagatacgtacgagatccagcgcgtactcggctcctccgagtcatacctcgtcaacgacccgcgcgagacataccttctctgcgatgctatcatagctaccggtggcaccctccaagcgaatgatcttgacgtctggcaggtcgtgaaaagcaagggtgatatcgtcgttggcctctatcagcgactgtga

SEQ ID NO: 27187 - DNA, 297 bp, Emericella nidulans
atgctctcgcgcagcgacttgatccttcatcagttaccctatctgacaaagattgttggcaaaggcacgatgtcaaaaaacctacagcaaatcaccgggttcggagctgggggctcagacttcacctcacaacatgacgaggattacgatttcgagccatccttttgtgaagccccaggccccaagtctagacttgaaaagaggattggactgtctgaaccgcagacaaccttgtcctcccaaacaaccgatgaacggcttgttctcagcgatgacgatattatagatgacttgtaa

SEQ ID NO: 27188 - DNA, 375 bp, Emericella nidulans
atggctctatcatacgccgatgcagtatggctagtcaagactgacgcccaaaggcatgcttcgttacagagagagcgatgttcgatctacagtgcctgcgaccgagtcgcagctgagagaatcaccagccctatttccacccccgagtacgatacctcggccatggacggatttgccttgagttctactgcaacagagactgccagtcccgagacgccagtcacgtttaacgtcatggctaccacgacagccggcgaccggccgtatccggctgcagacagtctgagggatgcaaaggatagcattcccccctgcgtagagatcatgacgggagctccttttcctactggccaggagtgggagcgattcgactga

SEQ ID NO: 27189 - DNA, 225 bp, Emericella nidulans
atgtcgaaggaatctttgatgagcggaggttctttcgagaggctgaaccgtgccgtcgctcaacttattgatgattttagtatggtatctttcttacagctggacgttcaggacgaggatagtgttgctgccgtgctaagccatatcgatgccgccattcaattccatgaggcacaagagccgaaagagcctaacgatgcgcaggatgttgattacgaggattga

SEQ ID NO: 27190 - DNA, 402 bp, Emericella nidulans
atggagcacatcccccgtatttatggccctaagctccagactgccaacctcacagtgccctatttatctggttcctggcgatatgggaaccagatgaagggctttgagaggttccgactgtttcctgtgcaacctggaatcaacgccaaactcagtaatggatgtctcaacagcctctccattgaattcctgcagggatggctctacttcggtctgcttgccgaagcattcggcacggcagagatgaaatttgacccagatcattacaccgaccgctctgcctacacagcgtttgtcacgaccaagaagctgaatcgatatatttggtatccggctgctgacgagattgacatcactcggcgagcctcgataaatgtcttgagtttgccaatgccgttttaa

SEQ ID NO: 27191 - DNA, 411 bp, Emericella nidulans
atgttccggatgcgccccattgcagaacgcatcaaccctttgctcttggcgtttgcctcgtctctgcaacagcaaaagatgcccgcccttcaagatgccgagctgtttacgtggcttacgtggcggccctccaaggagagggcgaaggagtatgaagggagtgatgacgtgcctccaacttcgtatgaggaggagacggttatgttccgatggggggtgagatacgaggcgcctgccgttggaagaaattggaaagaaaaagtgacgtggcaggtcggtgatgactggaggccaaaggacgaagtcatcaaggcgtttgaggatctcgtgggcggagacgaggagaacatggagtggaaagcgtttgagtttgtggaagagagggagcaggatccggaggattatttatga

SEQ ID NO: 27192 - DNA, 253 bp, Emericella nidulans
gccttgcaaccttagtacgtcgtactaaggtccactggggctgtactatataccgtacaacatacactcctctctctgaggcgcacttcgccagaattatcgacctcataaatgtcctcatcaaggaaaatgtgcgcactcagcatgataatgctagtgacaaagaacgtgctgcatatcataccctcatggagtattacgaacccattataatgaacgacaagtcccaatttgccggtatgactattacgat

SEQ ID NO: 27193 - DNA, 807 bp, Emericella nidulans
atgggatccaacgcgacttccaccgagcagcgaggtgaagagattctccatgtcttctccaaagcatttggcgacctccttgctgcagacccggccgccttccaggtcaagttcaggaagatggccgcctcagcgtttgccttttaccgcggtacggcatgtctcttctaccatgacctcgaggcgcagacgcagaacgacgtttttctggatgagcagtccagtcgcatctggatccatggcgatctgcatgcagagaactttggcacctatatggactcccatggccgactgatcttcaacgtcaacgactttgacgaagcctacgtaggccctttcacctgggatgtcaaacggttcgcggcatcgattgccctgatcgggtatgcaaaagccctcagcgaccagcagatcagccggcttgtgaggacctacgccgtggcgtaccgtgagcgtatccttaccctcgccggcaacgacacccaggaggtccgacggtttactctcgatacggctaagggtcccctgcttgatgcactgcgcaatgccagaatgcagacgcgggttgccctgctagactctcagacagagattcacgactacgaacgccagtttacactcggcggcggcgctatcaagctcgatgatgtaacgagagacaaagtaattgccgcgtttcacaagtacctgcagacacttccgcacgtgaaaccggagtcgagcgcctaccgggtcaaggacgttgtcggccgccgtggggtgggaatcggatcagccggtctccctcctacaatatcctcctggagg

SEQ ID NO: 27194 - DNA, 356 bp, Emericella nidulans
atgatgatgatgatgaggatgatgatgatgaggatgatgatgatgatgatgatgatgaggatgatgatgataatgaggatgatgataatgaggatgatgataatgaggatgatgataatgaggatgatgatgatgaggatgatgatgatgaggatgatgatgatgaggatgatgatgataatgaggatgatgatagtgaggatgatgatgaggatgatgatgaggatgatgatgaggatgatgatgaggatgatgatgaggatgatgatgaggatgatgatgaggatgatgatgatgaggatgatgatgatgccgatgcctacagtaacgatgaagacgattattattatagctag

SEQ ID NO: 27195 - DNA, 1108 bp, Emericella nidulans
  unsure (1)..(1108): unsure at all n locations
atggatgcggcgggagatgcacttggatctggcgatccgctgatgggcgttgcgtcccaacaggtcggaccagaatctagcctcgaccatgagctgtacgatatcaatacctatagtttctcaccctcggccgttttgcagggtatgcactctccagacggccgacgggactccaagaccaacacttctggtccgcaagatgctgtccactgcagtcccgcttctatacatgctgtgaattcagcgcccaccccgacgttcgcatccaatcagtcgcggtcctgtcaagaaaggaacgcggcggcctcgccggcatcttccgaaatcacgagcggtcgaccgtcgtcgcctctgatgcgcttcgttggatcctcgggggacctcgacacctaccttctcgcgcatcgtcactacgacgaacagaacacctctctttccaggcatactcatattgtctaccagcgcctacagaacctggagagttcgctggccgagtccatgcccccgccgcttctgactatgtgccggaacccgtctctccccagagggcatgagatcacagacaccaagctggtccaagaggcgcgacaagaggtccagcagttgctgaacgccgatacggtgcagcggctctgcgcccttttttcccgctttgtgcacccatacctacccatcatcgaccggaggacgctgaccaaagaaagttcccgcctcttggactcgcccgccttgctggctgctatagctgctactgcaagtcactttgtggcctacgacgatgttctgtgcctcgaatcggctaagcctccgtctccaggccggctgtatcagttgagctggcacctggtactgggggagctcgcctccccgcggctgtcaacggtgcaggtcttgatcctgctcctccatcggcacctgcctgacgagctctcctttgaaggatcgatggactccaacatgcgagggctccttgtcgcgtcaacgtacactctcggcttgaaccgggaaccaggtaggtgggacacgctntcgccgcaccagcgcatgctccggagatgtctttggtgggtcgcatgggtgacggagaagtggatggcgttcagcgatg

SEQ ID NO: 27196 - DNA, 310 bp, Emericella nidulans
atgctgttttgcttggctttgcttcatgcggggtttatcccagctttgcttgcattcctcctctggtcgtatgtgcacacttcaaatgccgctcttggtattcacggtaatatattcattaactgctagtctccccggcgcaatcggcatgtatgcgctctctctcggcgtacaacggattgatgaagctcttccggctccagtctacgctctcctctccggcctgaacgcctccactgtaggcattattgctcttgctgctgtccagctagctgaaaaggcaatccgtgataagatttcccgaatcctg

SEQ ID NO: 27197 - DNA, 289 bp, Emericella nidulans
atggcgcaacttctcgttgtcttgggcgcgacgggccagcaaggcatctccgtcatcaaccacgtcttgtctgaccccattctctccagtaaatattcgatccgtggcgtcacacgagatgcctcgaaaccggctgcacaagatctcatgatgaagtcactcgatattgtctcggcggacttcgacgacccggcatcgatctatgctgccttacgaggcgcacacaccgtcttcgccatgacatgcacaatctatgacgagcatgccaaaacacgtgaagaagaccagg

SEQ ID NO: 27198 - DNA, 327 bp, Emericella nidulans
atgcgtctaggatactgtctctgcctttgcggcctgctcgccagctcagccgtgctggcccaggacattgactacggggccgccgccgagtcaatatccgctgtcctggccgaccccaccttcgtcccctatgcaaagcccacccaaaaggtctcagagtggattgccgtcggcgattcgtactcagcaggcacaggttgcaacggcaacaacaagaggatgggcagggatgctgttccgtgggcagtgctcatacccgatgcagatggcgcaggatgcagccaattagggcttcgtcaacaacgacgacaccctcccttgctttag

SEQ ID NO: 27199 - DNA, 613 bp, Emericella nidulans
cttcaggctcaagggttcccgaccagcaagctcgatggccagctactggccccctggctggcgtcgctacgacccagcgcgtcatggcagcgaagccaacttcatccccggcggctgtcttctctcggttggattctcacatcaatttcaccgatgcttacggtgtctacctgattttcgagaagtgggcccagtattgtcgacaggtccaaggcctcccggcgcagcctgcggcgttccctcacgcaacgtctcagcctcaaacattgccacctcccgtacttcaggtgtcccatgaccatgccgccgagcagtactcgaccttgaagcataggccggagctgtggaagctcatcggtctggactggcgcggatctgccacctccccaccacctgaacctcccttccagctcgcagccgggggcgcgaagacatgcatcttctccctctccgctgcggctcaggcgactctcaagagagcagcatcctctctcccttcttcctctctccccccaatctcaaccaacgatgcgctagtagcctggatctggcgaaccatctccaaagcccgctttcccacaggcaagccagatgcgccgtatcgagacaactc

SEQ ID NO: 27200 - DNA, 238 bp, Emericella nidulans
gaaggtcccgctctggctcaaaagaggagctcagcaggcctccgctgagttcgctgagcgtgggaccgacgctgtagtggaagtccagggggtggcggattgcgtgagagatgaggccgctgaacccgatgaggtcctggacggatctcacggggtgatcgtggtacatactcgacatcccaagtggtaagaattgagtctagattggagtttgacctgttcaacctggatcaggtag

SEQ ID NO: 27201 - DNA, 692 bp, Emericella nidulans
atggaatactcaagacgcaatgtaacgaacactccgaatcatcagcaactcgacggagccctcgactcctccccggacacaatgatgaagcaacggtttgcggagtggcagcgggagagggaagctgtcagccgtacaatacaaatggcaaactcgagtcaagttattgttatcgacagcgatattgacaccccgagtccagcacggagggctgacgatgaagatatagatgatgctgatgacgatctttggatgccaaggcaggaaagaggcgaatgggagcaagaggaagcaggggataatatcgacaatgaggaagaggattatgatgatgaagatccctggcttccgaggcacaacgctcaccagagtgcagaagacgacgatctgaaagaagacgatggccaggaaggagatgacaacgttgaccgaagcccaagaatctcactacaggagaatgaacaacaacagaagaacgaacagcagcaggagacagatgaggagggggaggactacgacgtggaaggcggaatcaattatgatatttcccgaagtccccgaatccgcagtcaggacgaacatcttcagcaagcagggccagggtgaagacttcaaggaggatgaggagattgccgatgccgctgaagatgaccggtatgaagatatctggcaggagcaagctaaagacgaag

SEQ ID NO: 27202 - DNA, 785 bp, Emericella nidulans
atgcatcttatcagctccctctctctcttcctcgcctttgcactatctgcattgggttcgttgatagtcccaaagagaacctattccagctttgcatctttactaacttctaaaagccatgaccataacctctcccaagtcaactaaccagaaagtcgacttcagcaagccgttcacaatccgctggactacggttccgtaagttcctgtccatcagcatatgagaactccaaacacaactaactgtacaatgaaatacagctccgaccccaagcagttcaccatcacgctggtcaatatggacgggcacaacgtggatcaggatctcgctgttgacgttgatgcatctgaggaggagtacaccattgataaaatcgaggatattcctatcgcgtatgtctcctagcaccttttcctcgtcctctgcgtaccattcagtcaaaagcaatccttcgaagagaagaaggattcatgcttatactaaactttgcaccagaaacaactaccaaatcaacttccgctccaccgagaagaacaacatgggtattttggctcaaagccccaggttcaacgtgactaaggtcgcggaggatgaggagaccggttagtatcgaatccttcctgtctacgttatttagctgttcgagtaccaacgacataccaaaacagccgagcccactgccaacgccaccagaacacaatctaacatggccccgacagagacagacgcgaatggagctggacgtgcgatgggcgtcttttccggatctgttgccatggcgggt

SEQ ID NO: 27203 - DNA, 408 bp, Emericella nidulans
atggagatagacggtggatgcgcgaggctgtcaactgttgtcgactatgtcaatcacgacacggacgtctcgccaaatcgttcctgcatctggtctgtagcaccgctgtgccttgctgaattccgatgggaaccaggcatgaaccctggttttgactgccgtgcattgcagcggctatgcaatgcaatgactgccgtcaatccaagctttatcaaatcagggctacagtctgattgttcattgtcggtgtcactgacatggagtacatatcaaacggtcggcattattctagtcggctttgcacagacctccaggcccttggaactaatcacgacatactactttgaagctacatttggagctacatttgaagcgcttgtccggttcgaccctgtggttggcagttga

SEQ ID NO: 27204 - DNA, 237 bp, Emericella nidulans
atggttctgccgcctcgcaaggcagatgcagtgggctccgcttgctactccgactttgaagctgcgtcaattggcctgacggaacttttcttggttcgtcaagcatacgcaataaatcgaaaagctgaccgctacacacctttcattcctgttcgcgactatgtaattatttggtatcagccttatgatggaggatttcagagcggatgggaccaaacgcacagtccaatcatgtag

SEQ ID NO: 27205 - DNA, 690 bp, Emericella nidulans
atggttaacaagattgttgcccttctggcgctgactaccccggcgtttgcgggtgtcgcccattggaaagaaccccactggaaggagcctcacgacaaggaacctcactcggtaagcccaggtggtcagcttcgacctgcccaagtatgtcaactaagtaattcttgtctagtccgtggcaaacactaccgtgactcaccaaatcaccaagaccaccacctacacaaccaccacatgcccggtcacctcgactgtcgtgacttccggaaccaagaccctgacagtccccatcaccttgaccaacactgtcacgatcaccacgacctactgtgaggacgagaccaggccacctgtccacccgactgcgcccaccactgggaagcctgctccccctgtcactggcaacccaggtccgactggcaccccagccccaactggaaagcctgttcccactggcaagcccactcctatacccactggcaaacctcgtcctgttccaacaggccccgtgaacaacggcaccgcgccgcccaaccctccgttccagaacagcacttcgccgcctcttattccgactacgagacccgttcccgtgcctcctggctcctccccagctccggtccctgttcctgttccggttcccagccctggtcaacccgaacagcctggtacccctgccgcccccggagg

SEQ ID NO: 27206 - DNA, 234 bp, Emericella nidulans
atgtaccattcgcccgacgatgggtcggcaattgcaaaagtcacgctgtggatcgacgcgcttatcagcgggctactgctgcttgggacacgaaaactgagattgggcgcagcggtagccagtctgttcttcatctcgattggattgaggatgcagcttaccgcgggaaaggatgttgcgggggacattgtgcttgttgcggttgcggccggcgcagtttggggatcgttgtag

SEQ ID NO: 27207 - DNA, 668 bp, Emericella nidulans
atccctcagcttcagaggcctgggcccgaagtcgccggccccctaagctccgccgccgccagccccaggactctggcgagccttcacttcccccggacaatgcaatgccgctggcgcagccagcaaggaacaacttatccaaacaaagtcctgaagggagggactcgcatgcccatgtcaacgacgccgggcttgacgacgaacgcgacggacaccggcatgaacatggacgcagttcaaactcacattctaccgctccctcatctgaacttgctccctcctccgaagccgaagacacaagctcccttggggttgagcctacacccgctcaccctcgcgcccgtaatatgcagcaacagatcatcttagacaggtcgcaggacggggaaggcagggagtcgcagcgactaatgcagataaacaacctcgaaaacccggcgggcgagatggtgcgtgatacgcagacgaaaacggtgaagagggtgaatggggtcaaggacggagtgatcgggtccattacgcgccatgaccatgaaagagggttgcaggaacggcccgggaagacgaacgataatgagcagttgaggctccggctggatctgaatcttgatctggaggtgcagctcaaggcaaagattcgtggggatttgaccttgcagcttatgtag

SEQ ID NO: 27208 - DNA, 243 bp, Emericella nidulans
atgcctctttctgacatgaggccggcctccaaccaaccagcaaccctaaaggtccttcctaagattcgagagacgcgtacaacaaagcacgagaagcgtctgaaacggctacaagcccaatggcgtgaagacgaggctcgaattaaggagcgcgaggcggcggagcgagaggaaagagaggaagagatggaggaacagttgcagctttggaaagaatgggaggctgaagctggtaagatatag

SEQ ID NO: 27209 - DNA, 787 bp, Emericella nidulans
atgcgcatgatactcgcgttggctgcgaacgacatgcatcgaaacgggctgctcgtgcggtctccaggtcgaccctctgcggaggaccacgcgcgctatcattatggcctcgcagtgaaggaattccggcagctcctcgagacacgcgagaagcccctctcgcagcccgagttggagattgtctttgcgagtatgttcctgatgatatcctacgagtggcagtttgggcaatctgtgcaggatctccagcttcacctccgcggtgtgcgctcgctgttagaatcgcactctaaactctttgagggtaaagaagtagacgaggtactcatgttcatggacacggtccagtcggaagccgcgcctcaagtctccttcattccggaacagttgctcctttggataatgtacgttttgcccagttctttgcacaagcgatactgacggactagatatatcgactcgggctgtcggtcgatgggaacggcagattcgctcaccgaatacgtgctgcaatctggaaaccaggctattcatccggaccgactctatcgttgcgctcgtttatgggggcggtgtttttggggcaagcaatatcctgaccaggaggtgtcagatgatatggaaaactaccgtgccctagagcttctccacacggggatgacctctcccctacaaaatatgccaagccctatccgatgacgcggtacagcccaacaaccaagggaagttacttttgaaggagatcaaggccacccgcgaagtatggtttttccagactgtcttggac

SEQ ID NO: 27210 - DNA, 1245 bp, Emericella nidulans
tccactccttcatccgtatcttccagttcctactcggccgccaaatctcggcttgcttctctcgcctcacacatcatgggctcctcatcagcttccccggtcttctcgaccgctgttgtcccgtcggcgccagaggatccgctctttggtctcgcgcaggcttatcgccaggacccctcagacaagaaggtcgatctagtcattggtgcttatcgcgacgataatgcgaaaccctgggttttgcctgttgtcaagaaggcagatgagctcatccgcaacgaccccaaccttaaccacgaatacctcccaatcaaaggcctcgctgaatatacaaccgccgcccagaaactcatcatcggcgccgactcgcccgccatcgcggagaaccgtgtctgcacattccagaccatctccggcacaggcgccgtccatctaggcgcgctcttcctcgcccgcttccaccccgcaacccccaaaccgaccctctacctctccagcccgacctgggcaaaccaccaccagatcttcacaaatgtcggcttcacgcttgcgaactacccgtacttctcgccgcagacgaaaggcctcgatttcgacggcatgatcaacgcgttgcgctccgcgcccgccgggtcgatcatcctcctccatgcctgcgcccacaaccccacgggcgtggatctcacccaggagcagtggaaggaagttgccgtggtcatgcgcgaccgctcgcatttccccttttttgactgcgcataccagggtttcgcatcgggcgatctggcgcgtgacgcctgggcgatccggtatttcgtcgagcaagggttcgagctctgcatcgcgcagtccttcgccaagaactttggcttgtacggtgagcgcacgggcgcctttcatttcgtttccgcgccgggcccggaagccgctcagtcctcggcacatgtcgcctcgcagctggccattctgcaacgctctgagatctcgaacccgcctgcgtacggtgcgcggattgcgagtaaagtgctcaatgaccctgagctgtttgcgcaatgggaggacgatctgcgaacgatgagtgggcggatcgtcgagatgaggaaggggctcaggcagcgccttgaggagaagaagacacccggctcgtggaaccatattaccgaccagatcggcatgtttagctttacggggctcagtgaggcacaggttaaggtgctgcgtgagaagtggcatgtctatatggtatga

SEQ ID NO: 27211 - DNA, 694 bp, Emericella nidulans
atgtgtgcaacccttaacctgagtccatcttatagatctcaagacgctaagcctatgaacagggacggaaatactcggctatgtactgcaacggccgctgccagtatgcgtgagtcgtttggcagcgacggccagccggggtcctatgcagacatcgattataccgactgcctgttcctggtcgggcacaacatggccgccacacagacggtgctatggacacgggttttggacaggctggaagggcccaatccacctaagctcattgtcgtcgatcctcgaacgtcagatacagcgaagaaggcgactgttcatgtcaggcctagactcgggacgaacgtggcgctcttgaacgggctgcagcacctgatcatcaagaacggctgggtcaacgaccagtatgtggcttcacacgtctgcgggctagaagagctcaagaaggttgtcgagaagtatactcctgaatatgtggaaaagattaccggagtgccggtagcccagcttcacgagactgcagaagcgctggcactatccggcagtctgctctccacggccctgcagggcgtctaccagtctaaccaagccaccgcggcggcttgccaaatcaacaacatcaacctcttgcttgggcacatcggcaagcccggcagcggaatcctgcaaatgaatgggcagcccacagcgcagaacaacc

SEQ ID NO: 27212 - DNA, 316 bp, Emericella nidulans
ctcactctactttgcgcggtatccacccctaccgcggcgcgaaggatttccagagtgcgcggagtgagtttgagtatgaggttttttgggcgttggtgtcgacaactgttgatgttgtcctcgatcaggagcaccagcttcagaaccgttccgcgacgcctggctctgctgcgccggtgacgatgcaccctgagactggccctgagtctgcgcctgaggtcccttcccccgcctcgtccgctgactttgaccaccgggacctttactcccacgacctcttcgtcccccacggccgtctcgttcagccttcttctgc

SEQ ID NO: 27213 - DNA, 1006 bp, Emericella nidulans
atgtcgacaaaagacaattcaagtccggtgcggcctacgaaaagatcacgggcaagtggtgcaggtcttgacaacgtaaaatccaaaggcgatcgggtaaaacgacgtcgaacctccacagacaacgaaacagggaaaaccctgaaagattcgaatgccttggaaatttcacaacaattcattgatgcaaccgaagctccctcagaggctccaacttggactttgtcccggcccatcgccggccatttcacaaacacagatcctgttcttacgcctgacgagcagtatgtattccctcacttctatgactttactgttgattaattctgatatagatatctttttctcggtgtcgaaacctcggtccacgtttattcagttgctacttctcgtctcctccgtgtcctagaagtaggctccggcgatagcgtggctggatatagactttcctccacaaactatgaccgtcttcatatcattacattatctgggtccgtgagcgaatgggattggccttccaacaaacaagttgctcattggaacacggcaccccggattatcgcagttgatattgtatacgattcttcctccggtacattattttcactacggaagcgcaaggatggaaagagagaattagcggtcacgccactgaataatgagaagccacagagcactgtcatactcgagaccaatgccaaaatcgacaagttcagagtaagcgatgactttctggtggtgtacggtggtgccagtgttttttttggtacttcttgctccactcaaggttctgagtcgcacaagttcgtgtggaaggaggtcaaactagcttccactgttacctgtgttgatatatggggtactggaccggagtttgaccttgcacttgggggtgctgacggttctgttttgatatatcatattcaaggttccacgattaagaacccacccaggcgactacattggcatcgagaccctgtcacagccgttcgctggtcaaaagatg

SEQ ID NO: 27214 - DNA, 360 bp, Emericella nidulans
gtcaaccgtcacattgtccctagcttctatcgcgtgctccaagagcaagatcagcagaagcagattgaacatgcacatgaactccatagctcattcaacacgttaatagaagtcgccgaccccgaaggaccgttctttcttggaccggatctctcttttgtggatgtccaagttgcgccctggataatccgcttgaaccgcgttttgaaaccataccgtggttggccggacccggaaccaggaactcgatggagcgcttgggtgaacgctatcgaggccaatgatagcgtcaaggcgacgacgagcttgccggatctttatcttgacagctatgagcgctatgccggtgagtgtccttag

SEQ ID NO: 27215 - DNA, 339 bp, Emericella nidulans
atgccggccgagctgcgcggcaagcgacaagagaactacacatatgccatagaaaaactcaagaaacgtatgcaaaagacgggtgatcagggcgacttctgggaccgggtaatcgtcaaaagtgccgacgggaaccaatcaggagatggaatgagctatggcgagatgatcaacaacgcggcggtcatggtggccgtcgggtctgcgccgaccttggcagcgctgttccgctgcccgtatctactctgcaactctgttaagtcggtcgttgatgcttcccattttgagctatacatcactcatactattttcctatactctatcgactttttgttttag

SEQ ID NO: 27216 - DNA, 463 bp, Emericella nidulans
accgtctcctttgacaatcaacctgaacggacctgggaggctgaccgcccaaccactatcgatcagcctgtagttgagcatgtcgataaagctgagacgggtgctggcgatattgccaaggatgtttctcgaagcgttgcggaggcacacgaaactcacgagggatcgtttgccgaacgcagacaagagtccgagtctcccaatgaggaagagtggtttatgccgggtggctttgaacctgaggagtcgaagattgagcaacgcagtacctcgccaacggcaaatgtttctcaatcaaaagtttcctattccattccggaagagagggagcctgaggctggacctgagcctctgaagcgaaccgagaccgaaggcaccgatgattttaatgatacccccgaagcagctatttatgacgaaaacgaaggcgagaaaacaaagaagaagaagagaagaaagaggc

SEQ ID NO: 27217 - DNA, 207 bp, Emericella nidulans
gatccacttgctgaacagtcgacaagtgtgtccgactccaaagcgggacgcaagacagaagtcatcaataaaggaaatgtgaaggttaatgctcctctaagcggcccgccattgccggacaatgttgtgtcaaaatcagcgggtgccccggaggaactagtcccagccgcccctgaagcttccaaacaattacagaagatccctata

SEQ ID NO: 27218 - DNA, 264 bp, Emericella nidulans
atgccctccatccctacgcactcttcgcgaaccgcggtgtgtgtgttccttgagacgactgcagcgacggaccacacaaagggcggcccgatgccgcggacggcctcgcctaactgcaatacgccacatgcacctcaaccagtcactgaccatgagccatatactagcgctgcgatcctcatagcggaacacgagggccccactgccgaacagaaaccagctgctggcgactctacgtatgcgacagatcagcgcgagacttga

SEQ ID NO: 27219 - DNA, 2556 bp, Emericella nidulans
cctggcgctatagaatcctccccatcggagtggctacagcttgagctccggaggatatgtgccaatgtgctccagcttgacaccaaagatgtcgatccgcaacggtcctttctctccttgggcggcgactctctgctggccatcaagatattggcccaatgtcgggctcagggtattaccatcaacattgccgatatcatggcagcaactacactggagtcgctgtattcgatggcccagggcccggctgagcttgcctcgtcctccaccagcgataatgccagcgacaaggacagctcactggatgactcagagactggcgccctcacccctaccaccgacgctggctcgagcttggccgacacactctcgcccgagatgaaggccaaattgtctgcgctctccgtatcccaggataccgctattcaagcggttgtcccttgttccgcaatccaggacagaatgctcgtcagccaactacagaatcctcacctatactcgtgctgctttgtgctcagattaacccactcacacccaggcctccccgtcgatgccaaacgactgggtacggcttggggtgaagttgtcaagcgtcactccagcctacggacggtcctggttgagagcacacagcgaccagggcactacaaccaagtcattctggctgggatcattccggcagttgaacactatgaaggagccgaccacttaggctcagtcaagttcaacgtgaataacccaatcgtctttcagccgcactcgatcccacaccgactacagctggtccaggtctctccctcggaggtttatctaaaattcgacatctcacatctcctcattgatggacagtcggctgaagtcttgttaaaggacttgagcgacgcctaccgtgatggcgggctggcggcggcacccctgtcatacgctgattatgtctcctcctacctcctcgaacctgctcagctaaacacatccagaaaggagtccggcatggagatgagccctctaacagttccaatggacagaccaaacgaagggctatttgactttcagacggtcagcgcaaacgtacctctcgattctcgactcgtccaatccgtctgcgcgagatactctgtgacacttgcgacagtgtgccagctagcctgggggcttgtcctgcgctgctacgccggcacagacagtgtctgcttttcgtacgtcaactctggtcgctccatgtccattcctggtgtgcaggaggtcatcggcccgatcgtgcagacctcgatgtgctccattcagctcggtccagctgatgagttacccaagatcctgcagcgcatccatagggatgcattacaggccatgtcccagttatcgcctctggaggcgaatagcacatccaagtcagcgcggcacgtgagtaatacgaccatgtcatttcaacgagccctagatgatgctgctgcgcagagagctggtctcttagttaaaattgagggcaaagctaatcctactgattacgacatctctctgggcattgcgcacgccgatggcctctccgttgatctggatttctggggctccaggctcgacgaggaaagcgccagaacgatgctgggtgcattcgaggccgcaatcagagggatcattgactccccggacagcactgtttctaatatcagtcttctctctccgggcgaggtctcccagctagcgcaatggaacgcaagcatcccgaagccggaacgagtgtgcgtgcatgacaagattatggaaatctccaagcttcagccaggtgctgcagccgtcaactcgtgggatgggaacctgacataccatgacctcactgttcaggcatcgaccctggcccatcatttgcgggatcagcttggggtagggcccgaacggtttgttggtatctgcatggacaagtcgaagtgggcgattgtctccatgctggcagttctcatggccggtggcatcgtcgttccgctgggagtttcccaccctcgagcacgcataagggaacttctgaatgatacagctcgtgtcgccctgcttgttgacggtaagcatggagaccggcttgcaggtcttgaggtggaaaatgctgccatgctcacggtggatcagcagcttctagactctctgccaacaatccctaagcccccagtctccggggtgacgcccgacaatgctgcctgggtcatctacacttcaggctcaacaggtgtcccaaagggggttgtactgctgcatcagaacatttccacaagtgttatcgcccacggagcggtatttggcgtcaactgtgttacccgtacagcacagtttgcttcatacactttcgatgtcagtctctctgatatcgtcatgaccctcttccacgggggatgtgtctgtatcttctccgaggaaagccgcatgaacagtctcaccgaagctctgcaggggctcgctgtcaactacgtcaatttgactccgaccgtgcttggcttgttaaaccctgctgatctcccagtgatcgcactgtcgtcgctggaggagaggctatggaccctgggatcatag

SEQ ID NO: 27220 - DNA, 393 bp, Emericella nidulans
atggtctcatcgtcgctgtttgtggcgccgccgttgagcctgatggagcaggcaggtcgcgtgggccaggctctatgtgtgaatagatggggccagtttcgcatgctgaattctgggtacgctgctatctcgcatgtatgggctgagacgatgggtcttgagtataacgatgagaaagtcgaccaggacgaacgcgggctgctcaagacgcactttaacaagattatggggaaagcccttcagtgtggatacgaatgggtctggcttgaccttttggctatcccgaagaagtcggacccttccactagcgatgctcgtcttacagagatcaagactctcattatcaacagtctggacgcagtatacaggaatgcggaccagttattgtgctag

SEQ ID NO: 27221 - DNA, 305 bp, Emericella nidulans
atgctcgcgagaagaagaaccaggagtgaactgacgatcaaaggactgacgagtcgagaggaaacgcgcaggcaagacagggagaccacgcaggagatccccatccaagcccaccctaacctctgggctggggtccagcgagataacggggacggcttcaccctcgcccggtacgacaaccacgatatcagctttgacgccaagcttgaatccatccggccaatcttccacgaaggcagggacatgcacgaggtgcagattaagctcaactttatgcggccgtactccatggaccatcgtatacg

SEQ ID NO: 27222 - DNA, 321 bp, Emericella nidulans
atggatcctggtggcctcgtcgagtcacgagcccaatcgggacaaaaagcatctgtccagcgtctcttcgcagcaataaagctcctcatgcctatcctgaagcatatcactacaactttccgcactaacaaagacgccggtcgagaccttttggctctgagccttgatccagctttccagggaaagcgcggatattatgttggccagaaagaagaagctgcggcatcggtgaccggagacgctgcggtgcaaaggcgcctctgggaggcgtgctggcagtgggccgggcttgctcctgaggaaactgtgctctgtcgctag

SEQ ID NO: 27223 - DNA, 935 bp, Emericella nidulans
ggccgaagaagtctcgaccgagacacctccggtcgatgccgtggaaaaagcccccaaggccaccgaagaacaaccttctactgagggcgctgctgagcagctgacccaggaagccgcagtcgagaaatcggcctccgaaactccttttccagaggccgtcgccgccgaggagccagctaaggaagcagtgactgaggagcccaaggcagaagaaaccgcggcaccaaccgactccactgaggcccagaaagaagccgcagaggagccagttaaggaagcagtgactgaggagcccaaggctgaagaaaccgctgcacccactgagcccattgaggctcagaaagaagctgcggaggagccggttacggaagcatctactgaggagcccaaggcagaagaagccgcagaggagccagttaaggaagcagtgactgaggagcccaaggctgaagaaaccgctgcacccactgagccgattgaggctcagaaagaagctgcggaggagccggttacggaagcatctactgaggagcccaaggcagaagaagccgcagaggagccagttaaggaagcagtggctgaggatcccgaggctgaagaaaccgctgcacccgctgagcccattgaggctcagaaagaggctgcagaggagagcaaggtggaagagcctgctgtcgcccctgaggctgatgagcccgtaagagaagctgcaggggatctcaaaggtgaagaggtggcaaccgctactgacgctgttaaatctgtggagaccacaaccgtcgagcctgctgtcgaagcggaagccgcaacggagaaggccaaggtagaggaatcgaccactgtcgacgaagttgctgaaaccgaagtcgctgaaacagcaaaggaagtcgcttccgaagagcccaagactgaggaacctgtcgccgttgctgaac

SEQ ID NO: 27224 - DNA, 279 bp, Emericella nidulans
atgccatacactagactgacattttcaaccgtgcagacgactctgagaagcacccttagcgtcgcaaatgaccttctccccatcgccaagccaacttgcgccagaatcacttactccactgccatggcgccaggcatatcaggctatacaatcttgaagcctgcaatcatgaaactgatcgagttcatcgagttcatcgcggccttacacccctccagcttttgcagccgctctgcaattcagggttacctgcgaccgccttcctgccagaacggctag

SEQ ID NO: 27225 - DNA, 274 bp, Emericella nidulans
caaggttttctctattgctcctcacaagtatgactcttgggagttcaaaactgtccccaataactctggcctgttgtcacgttccggtatcgatctttccgccgacccagcttcgccaaccacgtactctgtctctaaagctagccacctcaaatcacggtacaagccatcgatttgcttcgtacatcgaaggtccgatccactgcgttaaccgtctctttgcatgtagattgcaaatgatcgcacgggctccgacacctatcctttgggatag

SEQ ID NO: 27226 - DNA, 351 bp, Emericella nidulans
atgttggccactcggcttcccaatgtgactgcaaacacggtgaatgcgcctacacttcaagacattttaagcaatacccccgcaggtgtcttccctaatgcgacgcctgaatgggttgtttcatccacaacaaggtcaatgctatgctgggaaagccagcatttgactgcaacaagatcgggtgacttttacgattgcggatgtggagatgaggaagaaaaaagcgagggcagtggctccaatagcggacacaagaccgctcctcgcgaaagtagcttcggtgacgacactatctcacctgtggagatatcccgggaaccgtcagtgcgcccccttgactcgctatattaa

SEQ ID NO: 27227 - DNA, 259 bp, Emericella nidulans
atgctcgcttctcttcttcgtccgaaaaagcgacgagagtacgcgcaaagctcacagttcgcgtcgcgatacgctaccgacgagtcgcgatggccattgctgaacgaaaacgagggatacaatggaattcgtgaacaccgcgctggctttgaagatgctgaagaggagagtgttgaagatgaggatgctgacggggaagacgaggccgcgcccatcgagtccacgcctctacttcccatattctccgcacctcacctag

SEQ ID NO: 27228 - DNA, 417 bp, Emericella nidulans
atgctgcgcatcatcttgcgagctttatgtgcccgaccacctacacatttttttgatgtgctgcccatgtcgagttccggaaaggtctatcgaaaagcgttggcttgccatctgcaagagaagcctgatgttccaatcaagaatggcctcagtgaagaaagtgcagtatgttggaggcattcagatgaggccgcatcgtcagtacagcagctggtgattcgactcgttgcggatacaggggacgtgagtgattccgcattaaagcccgggccagagctgtactctggtggcatcgccagtctaggagcaatgcgtttctacaaagctgataaccattggggtccttggcttgccggcggggaaagctttaaacacatttatgtgcgaggggttgtttttttgccaaagctttggtga

SEQ ID NO: 27229 - DNA, 416 bp, Emericella nidulans
ccgtcgagccttggcgccgaaaaagactcgtcaagggatttgaggagaaggtcctcgaggccattgagaaggaaaaaatccttgttcacagccagcccgtaccacctgtcgaattcactgctacccaagacgctcactctcccacctccggtcttgtcaccccatctcctggagataatatcgcttcagaagaatcctctgaggcgactgtggccgcgaatacaccaacgacaaccgccgaagacgaagcttcggggagcatggctccagagaacataacaagcagcagtctagagtcctacaaacctccttcgttgcagtctctcctatcatctatgtccatcgaatgctgccgtcaatacatacattacctgctcagcgagagccccgtcaccgtcacacaacgcgatatttct

SEQ ID NO: 27230 - DNA, 240 bp, Emericella nidulans
atgcgttttgtccccaacctctcagtcgcccttctgggggccctggccgctgccagcgaggctgcccacggccaccgggctcatgacaacctccttcaccgtagggctgtcaggcctcccagcggtggcagtgagacaactacaacgccggctacaacagactatgtgaccgtctacccgaccccggcctctgaggcttcatctgagacggcgtctgtgccagagctgcgggtgtcttag

SEQ ID NO: 27231 - DNA, 330 bp, Emericella nidulans
atggccgagccaaagccctcgacgagctatatcgagtctgttggtgacgagaaagccatatcttatgacccaaaagagactgaagaatacgatccaaatgatcctcaggtatgtgattctatattagctattggcgcgggcaaatggcggatacaagtataggagtcacgctgaccgaagcagaattggtcgacggtctctagattgacgacgtacctcaccatctgcttctataccttcctcgccaatgtcaatagcagtaacttcacagtggctacaaaggccattgttcaggaattcggcgtctcccagacccaagccggcgagttg

SEQ ID NO: 27232 - DNA, 330 bp, Emericella nidulans
atgccacccagtcagattctcaaacaactccgtcatgtggatcccaccactgtcatccagattcgcgatatctacaacctccgccatcgcatatatcaagggaaacccccagtcccagctgttgttatatccgacttcaagcagtctccattaaaaaagcgccgtggtcaggcaaactccgataatctgtcttctggggaggcttcgacgtctggagctgtggagagtggtctgggggatgatcagggcgtcgctactcctgtcagtggagtgcgagtaacccaggatatgcataccccggaacaactgctgtacgacacgctgttctga

SEQ ID NO: 27233 - DNA, 495 bp, Emericella nidulans
atgccctccatccgcaccctcgccctgggcctcagcctcgccctcctggccacaaccaccaccgccgaacgccttaaggtggtctggtcgtccggctccttctccgccattggcgaccagtccggcaactacaacagctttgccatcattcgtgagaacggcgaggccatctacaacgatgggtaccccaaggacaggtccccgtgcttcaacacgggcgacggccgcacattccaaatcgagggcgactgctgggcctctggtcggcagttccactgcttgagtgactttggcggctcgccgaccaactgtgacgtacgcgatgagaacggcaatgtgctgggcactggtgttggacagaaggagactactttcattgggatctcgattggaacggatgcatcctgtgtcgtggagtttgacagtgatgatgcaggtcactgccctgtcgatgatgggaatgggccgctgcatgtgaccaaggacgacctctag

SEQ ID NO: 27234 - DNA, 276 bp, Emericella nidulans
atgaccggctcaatcggccaggcaccggccatcgataaacgcgactttgacattaaccgtcggtcatccactccccacgaaaccgcggctcaagaggacgaggccttgctccactcccgtcctcgctcgaggctttctgtaggcaatcggtttagtgacaatgacgatggtcttctaagtgatgttgtcgaggaaatcgtggaaagggaccgccagaggatgagacgggaagttgttcgtgttgggagcttcgtttggggagtgattacatggtga

SEQ ID NO: 27235 - DNA, 308 bp, Emericella nidulans
cgtatatctccagcccgggccaaaacatcaaccactcaaccaagtactttgtccgcgccttctctgaagctctttctgtggaacttcgtgcctaccctggaatcgtaaacacactactccttcccggccctgcggaaacgcaattcatcacgcgatcgcacgcccaggaaacggtcatgatggctgcgtcgggggcggttgaggatcccaagtccgtcgcgcaagtcgggtataaggcgttgtgcaagggcaagcgagaggcgttcagtagttggaacgccatgttcacgagtccagtcttcaacgtc

SEQ ID NO: 27236 - DNA, 369 bp, Emericella nidulans
atggacaacccacggggcgtctcatgccacacaaaccctcctgaatcgataactgaccggacgaggttcggcatccggggatgcatcgtttacgggtacccgtctactggcggcgttctcatcaaggggcccattgaccttgtcgatattaccttcctctcgctcccacgtttccatgtagcgcagcgctccccaagtgccgaagaggaagacagattctgcaatctcctgcgacggcttggtgcgacatggtggccaagtaaagaggagtatatcatggtaaatatgggctccagggagaagacagaggaagaggaaaaggtcctggtatttgggtggccggcggacggcgtggggtctgggtgttaa

SEQ ID NO: 27237 - DNA, 856 bp, Emericella nidulans
ccaccggatgccttggctgctcagttaactgagaggagagtgaaagctgactatgtattcttttatgcctacatccaacctgctccaaaagacggaggcggcatttggagtgccgccgaagaattggtcagggtcaacagtacgagtcccgcatccggttgcgttcacggcggcacagaatttacttacattgtccagccaaacttctacacaacttcctctcagccttggccatttcaaacactcttccgaagactttcctcctccaactcggcgcaaaatactacggcgtgcacctgggtccggcccaagtcccccaggaagaaaccgacccgcgtgtgctcctcgaaccgaacttctactacaaccaagaagactctctcattgcgttcgctaaaagtaacagctttaactggattacgacccgcccttcctggatccctggcgctgtcccggatgctgccatgaacctctgtctcccgctggcaatctacgccgtcgtccagaaacacctgggaaagcctctcgaatacccatctgacatcgtagcctgggaaacgcagcagaccatttcgagcgcccagatgaacggctatctgtccgaatgggctgtgtgacgcgcgacgcccagaaccagagtttcaacgctaccgatgactgtgcgttcacctggagcaagttctggcctaaactagctgccaggtttagtcttccatggctgggtcctgcgaccgacccagctggcctgcaagaggtcgagacgccgtataaccctgccgcctcgcgggatcggacctccggcgaaattgagatacaagttcacgctcgtggagtgggcgcgaagacccgaagttaa

SEQ ID NO: 27238 - DNA, 540 bp, Emericella nidulans
atgggtcgaaaaccaactttaactacacacgagactcgagcgcttgccggcctcatttcaaagcttgaccctgagaagcgaccgaccccagaacagttggcgcacgaacctggatcgtcggaagagtcagcccaggcaaagccggaggaaaccaacgcggaaatctccgccatattcgccgcagtgttgagggatgtgaggaatctacaaggtccgcccgaacacagagccagtgacaaggccacgggagcggtgagggaggaaacggaaaggcgcaaagaaaggctcggaagtgaagccgaacagagtcttgatacatttgcagcgtcaagggaacaagcccgacttggggagctacctagggatgccgtgcagacccaggagagcgagcgccacttaccggataccaatgatgcgctggcggagctccttcgaacaaacgagttgaccctagccagggccattgaactagtcgctgagcgggagactgcgaagatcgactcgacccttcacgccgcggttgaaaacacgactgactag

SEQ ID NO: 27239 - DNA, 216 bp, Emericella nidulans
atgcatgggccttccaacacccatcatcagacagacgcgacatcggaagacccttttgtcctcccaatccgctcacgcactgacgacccatcccgcccggccattagcgagctgcgccgccagcgtctgcgcgagttggccaagaagatgactggcgcagagagtgagtggcgtgaagaatatgtgcctgatgcgggacgagatggcgccagttga

SEQ ID NO: 27240 - DNA, 645 bp, Emericella nidulans
atgtctcacgaaataacactcgagcccttcctaataacggacatccgggaagccctcgatgtttccgaacttgcctttgcagcgctaaatcgattcctttatacgtctgctctaagcgaaaaatccatggatgcaatggtcgcgctacgagaaggacaattcaaagagccacacgtcaaggcatttaaagccgttcatactgcgacaggaaaattagttggcttaacgcgatgggcagtgtacgcagaagatcaagttgtggagaagagtgttgaggaggtcgttgaggcacgcttagcagccgatattcccgagcgccgggatgaggtcgcaagagccattttcacggaaattgagttaggaaagagagaattcctcggtgttggtacgattgaaaataacgaaaaaggggtcatcttgcgaaagagggtcgaactggaagccatccttgttcatccggattatcagaaaaaaggaatagccaagagattgctggcgtggggtattgaagaggctcagcgactgggcctcaatctttggcttgaggcgacagatgaaggaaggccggtttatgagagggcgggctttcaatctctgaaggaggtgaaggttgtctgcgaaggggttggcgagtctccggttact

SEQ ID NO: 27241 - DNA, 219 bp, Emericella nidulans
cccattggtgaggtcgttgaggaagccagctctatcggtgaactcgtcaaccacaccggtgcccccactgacgagctccttactgtcgttggctcagacggcaaggctcttctcatcaagctcgccccctccgttgcccacctcctgggcggtctcggcctctccagcgtcggttcttccgttggcagcattattgctaccctcggcaacaacctctaa

SEQ ID NO: 27242 - DNA, 222 bp, Emericella nidulans
atgacaggtccaggaagctcgcaagtccagcaggcgtaccagaggacgaaaaccacccaagggaccaagggtggactggcccagcgtttaaagctcccccctcaaccacaagccacagttcagggtgtagccagagttggatcgacgcaagcacggacactggcaatgaatctggccccgatggcggatggagctctggctggctggttccacgggacctga

SEQ ID NO: 27243 - DNA, 213 bp, Emericella nidulans
atgactgcaacagcaacggtgacggccgccaatgtcgacaccaatcaggagaaccaggtcaatgcctgcggtactggaggcgatgcgacgggagctgatggcgagttactgctcgtcccttgcacgccgcctgggtttgccacgatcacagtgacggtgacgacgaccgttacagaaagagagcctgctcagactattacggtcacagcatag

SEQ ID NO: 27244 - DNA, 216 bp, Emericella nidulans
atgaccctacgctcgtttctcttgggaagcgcccttgcgctctccagcgctagcgctttgcttgtcgtccccgaaatcggcgcagacggctttgtcatgcccgacgatgtcgcccgtcttaatccgcttgaggcccaggcggctcagcagcagcaggtcgacctgctctgcaccggttgtccacttgccattcaaagtggcgacgagacttctctg

SEQ ID NO: 27245 - DNA, 801 bp, Emericella nidulans
gctggtcgaccagttcctgaagaacaatggacggcgctgaatctgcaggttcttgtctccatggctgagatgtcgcacagcaaagatcccgccaatccatccaagacagagactgagcctgaggtactgccggatgtcggccagccagagcctccacggccagtcgagcctcaaccagagccagagccagagccagagccagagccagagccagagccagagccagagccagagccagagccagagccagagccagagccagagcctgaaccggaagctgaacctgagccggaaccctctaaagaaccaggcactccaccgcaaccagaaacgtaggtcggcattcccactcttctttcctatgattaacagtgctatttgcagccccggtttatccctcgaacaaacatacaagctcggcaaagaagcttctaccggtcaatcaatcaccgtcacaacatccgctttcaacctgagcattccctcccggcgagacatgaatcgaattatcttcatgcatttcgacgaaagccagggcgagctggatacggacaacttcgacgccttgctgagcattaacatcattcggcgtctgtcttctattcaaatccagaccaaggcagccggggagagttgggagaacaaagaaatgattccgttccctgcctggctgttggtcttactgagtggcctgcagatccgggtggatgtgaggaactcgatgctggaaatttatatcaacggcttccatctgtattcgcttgccagacagtttggaaacaagggggtcacgcatgtcag

SEQ ID NO: 27246 - DNA, 699 bp, Emericella nidulans
tcttctatcgtcgctgtacatcaaaactacggccagtcaaattacagcgcggcgtgcagcttccaggacacgtttgtccgccacatggtacagcaaggcgagcccgcattctccatcaatatcggccccatccgcgacgtcggatatgtctcggagaacccggaagtcgcagaggccctccgccgcaacgggctcgggtcaatcggtgtgtctgacgtcctcatcgttctgaaccacgccatcttgaacgctcgcggtgccaacccaagcacctgcgttgcatcaatcgggctcatcgcctccgacgacgaatccgagaacggacgcgatttcctcatgacggaccgtcgcttttctcaactcgtcaagcacaacggcagtaagcagaagagcgccggtgaggctctcgacgcaatcactctcctatcagcggcaacacaactcgacgaagctgtccatatcgtcacaaacgcgattctcaaccagctaagcaagcttatagtcacgcctgtggagatgctttcacctgcgcagagtcttgacagttacggcgtcgactcgcttgttgctgttgaattgcgaaactggatcggggcgtacttgcatgcgaatgtccagcttatggttattcgcgggacagggagcatctcgcaactggcggcaattgtggcgaaggagtcgagggttgtcaagctctaa

SEQ ID NO: 27247 - DNA, 264 bp, Emericella nidulans
atggccgaccttacgcactatattcggggcggacctatggagagacgtaagcaattccacggttactctggctccaactatacgtatcatgtaaacgctatccatgatcaccttgtactagtaacgccttctctgaacctgttgcagacctataccatgcttgatgactctcgccctatcgtgaccaactgcatagatgatgactgctctacgctcacggctgtacccaccacctcgcaacggagagagcgtacctttgactga

SEQ ID NO: 27248 - DNA, 420 bp, Emericella nidulans
atggccgctcttctgtattttctgggcattgtggcatccctggttgcggctgcttgggttctacgaaggacaacatattcacccgaatcgcaagtgcagctagaagttccaacaaatccgagtccgataagcaagaagctcgcagaggcgctaccacatattgtacttttgcatcgtaataaggctttcttcaagtctatcaactcatactgggcccaacaggagcgtgaggttatgcaagcatgcatcgttcaaccacgagaggctagtgaggtagccaaggtcatcggaattctcaaacgggagtatgatgaacaagaggcgtcgctgactagtagatctggtgatgtcttgttcgctgtccgagggggcggtcagtctcctgttcctggaggtgcaagcgccaaaggaggcgattga

SEQ ID NO: 27249 - DNA, 630 bp, Emericella nidulans
atgggggcaaaaccagagaagggagcggccgccaccaaacacgagaacaagaagaccgagcggagacagccagacaacggggcgcacacagaaaaaggagcccacaccaaagggacacccgaaaaccggggccacgaccagaaccagggacaccccaggccggagcaacaagcaggaaggacagaggccaagaggggcaggcagcacctaagcaccacaggagcccgccgaaggagcacaaccaaagaggccccgaccaaaaaggaacaaaggccagacgacccgccacaaccaggggaggaaccaaacaaaggaaaaaggacccgaggccaacaacccgagacagcagccaagccaacggcccaaaaacagaaggcaccgaccccaaagagaccaaacgacccccggcagaacaccacccgcgggagcgggccaacaacgggaccgcaacagaaagggcggaggacacccacgacccgggaaccaggaaaaaacaaagccgcacggccacaggagcgggaggcaaccagccggggggcccaaccaccgggcccccaaaaaggaaacccgccaaaccccgacgaccaaaaaaaaagaaaagccccagcggccggccaagccaaaacctga

SEQ ID NO: 27250 - DNA, 271 bp, Emericella nidulans
atgctcgtctgtctcgccgcggcgtcagggtgccgctcccggctgcgcctgggtctcggcttcatgtctgccctttgcggggctgagcggttgcccactcgatgtttttttctctcgctggtgttcgccagctctgtgcgtggtcttgtgttctggtctgcgcgggcgcgtccgggctgctgtggtgttgcccccttgctcgcctggggcccccttcgttttatcggccgccccccgcccgggtgtgggggtcaccgttttgatgtgttgg

SEQ ID NO: 27251 - DNA, 423 bp, Emericella nidulans
atgaaagtgcctgggccgctgggaattgcgaccacagtgctttttgacatcgccggcggctattgtggaaactatatggtacaaacggtggtggaaaactttgagttccttagccgtgcaaccgatcctgaagttgaaacagcatatgtcaagatcaaacagcagctgtccagcgttggtttggagcctgacccgtcgttgtccaagagggaagttgtcgagaccatgttcaaaacaacctccgaacatgccatgccatttccagtgcgaatgctggatgatgtggctactgcgatagtggagtatgcccagactctaagcaccctggaaagtctcgcgccggaagcccttgaaacattcgtggagctgctgcgtttcgcggtccaggaacaagggcaatctggcataacagcgtccacttaa

SEQ ID NO: 27252 - DNA, 447 bp, Emericella nidulans
atgaagacagactattccacgtctatcaacaaagatgatgatcggagggagctcatggaggtgtcgacagagctcatgcaatacgctcttcagcaggaccgaagcctcgaagtataccgaagaaatcaatatcaccagcgcacaccaagctatccagagagtataccaagtcttctctcatcaaccggccccggaacctcagctacaagccctcttaccttggggccccctgactacgacggttatcttgcttcgcctatatctctatcgcttctcgatgtgcctgacatggattacttccctggagctgatatgagcgcgaatgtcatggatggttttcctgatcctccgtcattcttcccatctggagaaccgataccaacgctccaagagaatatcttgaagaccagtttcgcggattctcccgttccggcaaattcgctttag

SEQ ID NO: 27253 - DNA, 317 bp, Emericella nidulans
acctttcttttgctctatcatcactcctcgttcgatgacgggaaataccctccccgccgtatcaatgttgaattgtcgtaagtccatgtttaactttcatcttgccacacctttccaaggctcactgacaaataacgtatattagcgctggcggcggccgtaaatccgagctccgcatggctaatatcgatgataagaaccagaagcttgcggaggagaggaagctcccggctaaggtgtccaatacggaaccggtctatattgccacagctgacgcgaaacctaatgatgacttcaccgattatccatccgattag

SEQ ID NO: 27254 - DNA, 371 bp, Emericella nidulans
atctacggcgcggccacgaaacaggtgctctgctcggcatgacacgcaacgcgagacgttgggtcgacaccgaagggcgccaccgcgtgcccaatgccgctgacgtcgtcttcctctggatcccattcaaaccggagtggtttgcgcccggcacctcaacccaggagacaatactgcttctcgcacgcgagattcgcacccagttaggaccccatctgacttcgccccattatatctcaacgctctccttcacggcagacagggtgattgccaatcttgccggagagggcgagcccgtcccatcgccccaggcgccgggtttctcgccgcagggcgcgctccctcttcagagggattttgcgtcgtccagg

SEQ ID NO: 27255 - DNA, 246 bp, Emericella nidulans
atgccggtcgcccagcccatgcctccgtatacgccgtacccgaacgccggactgacgatcgccagcgggcctacaatcgcggccgagtttcagaccttaaaggtagatatccggagcttgcggatggacgtgcaggggttgaggcgggaaatggtcgaggtgcgacaagagttgaacaccaagctggacttgattctgcaggcgctgcaacaggtcaaggcgcagactgaggcaaaggaaacatga

SEQ ID NO: 27256 - DNA, 502 bp, Emericella nidulans
atcttaagccaggttcagcaggatggcgcgagtattgtggtcggtccgttgctgaaaaataacgttgaagagttgctgaagagcaacactccgctgaacgtactggcactgaaccagccggagaatatcgaaaatcgcgtcaatatttgttacttcgcgctttcaccggaagacgaagcgcgcgatgcaggtactatattcgtgaccagggtaaacaagcgccgctggtgctgatcccacgcagttcattgggcgatcgcgtaccacatgcgtttgcgcaagagtggcagaaactgggcggcggcaccgttctgcaacaaaaatttggttccaccagcgaattacgcgcgggtgttaacggcggttctggtattgctttaacgggtagcccgattactctcagagcgacaaccgactccggcatgacgaccaacaatccaacgctgcaaaccacgccaaccgatgaccagttcaccaataatggcggtcgtgtcgatgcggt

SEQ ID NO: 27257 - DNA, 312 bp, Emericella nidulans
atggccaattcaacgtcttccgataacgaacctccttatatgagggctttgaatgctgccaggaatggcgaaaaaggtgcccttgaaggtcgagatggagagattctagcgtcagcccgcgactcaatatggcggaaagttgaaggcaatccgaactacttgctgaatcgacatgaattcgcattgttcaactattaccgacaatactacgagaagaccccgaaaaacaaagaaatcgcccggaaagcggttgcgcggttttgggacaactattcagaaggaccttcaggatctggaacggccaaatcataa

SEQ ID NO: 27258 - DNA, 518 bp, Emericella nidulans
atggccgtaggagacgcctacaaggcgcgacaggcccagaaacaagccgctgaggctgcggctaaggcaaatagttccgtcgtcaagggcaagggcgcagaaatcgagcacgtcgaagcccttgcaagcggtggcagcctcgtgaaagggaaactcggcaaacgacagcgtctgaaaaggcattttgcacgattctggtgctgttaccttctcgccggcactatcttcctcgccatttttctgccggtcttgtatgttccagttcaaccgtattcgcatggcagttaattgttgagactaacaggcacgaatagcttcctcgtcgccattcctgccatagcccagcgccttgtcgaagatacctcgcttcctgtctacggcgcgcacatcacgaaccccaagccggacgcgttgacattcaccctcgactcaggacttagcgtaccactcggcctaagcgtgcggcttgatcccttcaagctagatcttttcaaccgcgactccgacccggagataac

SEQ ID NO: 27259 - DNA, 539 bp, Emericella nidulans
atgcaggtgagaggcttcctgttcctggcatacagcctcaccctagttggcccacaggctgtggccaggtcagccgctgacaatcccgacctcttcccccggcaacaccaacagttgagcgtcgccgaaatccagcgcgaactcaacagcatcctctcaccgagatctattattttcggtgtagacgatgcccgatacgtgaacgcgacgaagccttggaatactgttgccacgccgcacatccagcttgtcatccagccgggcgaggaggcggatgtctctacaatcgtgcgtctctttctcctccttgattcgtaatataattgatagtgcataggtatcatactgcaatgaaaataatgtcccctttctcgcacgcgaccgcgcccacggcggcgcgtcctccctcaatgccttcaccggcatccaaattgacctctcccctttctcagagatcacaattgactcctccggcacctctgctcgtttggaggtggcgtttatggcggacaggtggtttcctacctctgggaccgggg

SEQ ID NO: 27260 - DNA, 215 bp, Emericella nidulans
aacgacgacgcaaaggaccagtatgagacactgctcgggctcgagagcgacacggcggctcctgcgcccggcagtatcgagcccaggttcgaggccggagtcgcggttgacgcacagctggatatcctcgtcactccggaagccaatattggtatcaagattggcggcggcaaactggtcggcggcgctaccctcatggatgcccagttgaccgg

SEQ ID NO: 27261 - DNA, 461 bp, Emericella nidulans
atggtcatcagcactcttgccgcagggatcctctccctcaccacagttgtctcttcctccatcactccacccgacgggtgtttccttccaacctggaaagtcatcagcttcaactggtacaacggctcccacagcctcgactgcatccacaatgaagccgacatcaacacgaaaggctgcctctgtggccgcggctggtgctccccagagggcggaggaaccgcctgtaccgcgcaagtggcaactgggtcaacgtgtgctacacgggcatgccaaactatcagctgtgggggtacggccccccgcagaccctgacctttgagttcgcagacggtctatcctgcgccgaccagtacatcgggtttcgggtgcatgacattggtaatggcccgagtaactgtggctacgcggaccgtggccagggacgcatcgtctcgttctacgggacttcaaatgagggt

SEQ ID NO: 27262 - DNA, 615 bp, Emericella nidulans
ccgtctagcaagcttcgcgaacgacatagtggcagcttgcgaacggcggcggccaggcgctcgcataatgtttttactgataaccctattgtcactggcccgcgcacgagcaggtcaaagaagaggctcgtggagataaacaccagcgacgaagaagaagagcaagatttagatgaccaggaagaagacgaagttgatgatgaagatgcgcctggagaagatgatgaagatgaggatgcagacgcagatggcgatgtggatatggacgacgctccacctcaaccgccagcatcaagaagacacgccaaggctgctgtaacatctgcgcctagagggaagccggtaaagagtgttgaggaaaaagagatggagcttgatgaagaggacgatgaagaggatgaagaggagctatcagaacctgattcgaatgcggatggtgaagccgatgaccaggaagaaggagtgacgctcaacatggatgaaaccggtgagcaggatgaggacgaagaagacgaggagctcgacagtgacggtgaaatgccggatatgagcaaattgaccaaacgacaaaggggttctttgggcaatgacttcctgcaactcccaatgggttag

SEQ ID NO: 27263 - DNA, 202 bp, Emericella nidulans
atgaacttctcctggctcgccaccctcgctctcattggcactgccatggccgctggaaagactgtaagttaaaccgggaagccggaggatctccgagcccgacatatcttggtcgttggcatgtaacgcatcccagctcccggccggtgctccttgcactaaggatggaaagatgggcgtctgcgagtctggtgtttgcatc

SEQ ID NO: 27264 - DNA, 984 bp, Emericella nidulans
tccgcgatgctgtgttaacctttgaattcaacctccacatccccaacccttttcccgaccaccctccgccgccgtatgatgaagtgattgacgatctgcctcccgagtactccgaggccgcgccgctagctcagcagaaatgcctggcccaagacgtggacttggaggaaaagagcgattcgagaaacaagtcgtcgcatcaaactatcgacttcgagagccctatcggcattagggagtataaaggcaagaagaaaaagggagggggcgcgaagaataacccgcccccccctgcgaatgatccgcctccgccgccaccacccgaagaaaaaaaggatccaccggacgaaggtgccggtgatgcaggaggttccggagatggaaatgatgacgacggtgataacggtggtgacggtggagacgaggatgacggctggggtgatgtttggggcacaacaactacaaagaagaagaagaagcagaaacagaaagaagaggaggaaaggctaaagaaagaggaggaagaacggctggctaaagaagaggaagagcgtaaagctcaagaagaggcggaacaaaaagccgcagaagaggccgcatcagcccaagatgcagcactcagctgggcggacgacgctgatgcgaacaacgacgactcatgggctggagttggtggaaagaagaagaaaaagaagggcaaggtaggtattttgtgtatctactactaaagcgcttgatattgactgaattagttggaaccaggcgggccggagccgccgtcgaattcctttcaagacgtgagtctgaacgatggagcccctcagctcgatttgaacttcgactcgcaaaaatcaaccggattcggttttggtgcttggggtggtggtggtggtggtggtggtggtggtggtgttggtggtggcagcaaatggggtatcgacattccaggtgcagctacaggaaaaaacacgaacccatggggcg

SEQ ID NO: 27265 - DNA, 229 bp, Emericella nidulans
atggaggggccttttcccatgtcgttgctcgcgagtggccggtggatctcggcgtggggtacattgacctacgcgcgccgcacggctagcagtcgtgttcagatcgggttcggcctggttagcggtatagcgttgcgtccgttccgacctgcatccgggttctcgtcattccctggttgcgatgggacttggccgttctacaccggcttggggggatttgttatcgatt

SEQ ID NO: 27266 - DNA, 273 bp, Emericella nidulans
atgcacctctctagccagctgccttacatgatgcgaccaactgaaccagaaagacgctccgcctactggctgcctcttccacttacttcattcacctactctctgcatcttcttctgaccgcttttgccacgccgcatcatctttacttcaaggcggaaatacctgctactcaccaaaattttgctgcccccccaccatcgtaccctctagaaaactgtcccacccatgccatcttcccccccacggctcccgcctctggcgcttttccctag

SEQ ID NO: 27267 - DNA, 479 bp, Emericella nidulans
gcttcgacaaagtagaagcggagaaggcagcggcggcgcaacaggcagaaaaagatgctgaactggaggcagaagaggcgtctcgacaagcagacgagctgattaacttcgatgaagcccccgcgtctcccgttgtggaagaagccaaagcgcctgcagctcccgaagcagaagctgttgaccttgcgcctgcgcctgagccagctgaggctccggcggaggaagcggcagccgtcactgttgataagacagcggaagatgaccccaaggccgccgaaccagaaactccagctgaggcgcaacctgaggccattgaagaagcacccgcacctacggttgaggaagctgcagcggcggaggaaccgtcaatggagcctacaaaggagcctgaaccgagcgaggctgctcccgtagaacaggccacagaagaaactccaactgacgaggttaaggagccggagcattgcagtcgctcctaa

SEQ ID NO: 27268 - DNA, 369 bp, Emericella nidulans
atggcgccaagcatctctctctctgaccccgcaccaccactacaagtatcgcatgctcactctgtcacgaaacacccaaaaaccacaatcgacgtgaatatcgtcgagatcactccatcagaccgtgacatttcatcctcatcctcatattcatctgaaatacagatagatgagctagagaacgaacgcgcccgcctccgccgccacatcggcctcgattctgcacacccaccgcagtctcaacctctcttcttcatcgagcgagtcccggacacggacacagcaccgattccatgtagccttcccgggtgtagggagggaattgccccgggttcacagcggttggctctgaacccgggcatgagtggg

SEQ ID NO: 27269 - DNA, 317 bp, Emericella nidulans
cttgcgtgctgtccgcggttccctcctcttctgttgccactcgtctgatctttccgcagtccagggtctgtctcggtaaataggctccagcgatccagaacagcccgaacagagaaagaatctcccactcacggccggccgacttggtgattgcggattgcttgctcgcggtacattccaacgccaggtgcgcattctttggctgcggcagcaaatatttgcgcgggctcgccgtcttacattcttctggcgcatttccaccactgttggaaggcttgccgtttccggcatttccgatttcttccaggcccagcatt

SEQ ID NO: 27270 - DNA, 315 bp, Emericella nidulans
atgagggggttagtcttgatctcatctttcaaggccgagtctgtcggttgcggccagcagtcgtcagggactccgcagctgactccccattgtgactctcgcaagttctgccaatccaagatcagggagctggcagcggtgcatgatggagcggcagggtacgtggtgggcgctgggcccacgttggccaaagtccagccgattgtcgacgtcgaggtcggcatactagagaggggagagaaacatcaacggcccaagagtacagacgcgcggagtgtgggatgtgtgatctggtggaaatttctgtgcggctag

SEQ ID NO: 27271 - DNA, 341 bp, Emericella nidulans
gccatgttcaccttctcctctcttccctagctcataaatctttacagatactctcatccaagtatggacctcttctctatctccgcgtcttcaacttccctgtagtcctcgtctcctcggcgtctgtggcctacgagatctttaaggctcatgacttgaacatctcatctcgttacaacccttcaatcgatgattccctcttgattggttcttctgtctttggtagtgctccttatggagattactttaagttcatgaagaagctcctggttactaagctgcttggaccacaggcacttgagcggtcaagaggcatccgtgcagatgacgtccgttactag

SEQ ID NO: 27272 - DNA, 465 bp, Emericella nidulans
atgatcaagctaagggacagggcaacaatcaccgccctggatccattagccggcaagtactgggtggtaatcaccatcctaggggccgtgactaccgtcatcgctggtctccttgccttcatggagggtcgtggattgccacaacgtcaccggaaggatttggttgagattagaaaagttcagacgtatattgcaggagcggagattaagctgaaatatggcgatcgcgctcgtgcagttcgagacgttaatgcttgcatcgagaaagcccgcgcccggtacgagagaatgcagaacgtcatagacatgaatcaccctgactcttatcaggatgggccccagttaaagagatgcaaccgattagagggacatcgcccagtcgcggatgaaaggacgcccctactcagagccgccgcggcaagggccaccggagctgacgaggaaggtggccttggaggcagatga

SEQ ID NO: 27273 - DNA, 273 bp, Emericella nidulans
atggttatggcaaacgcctctaaagacagccgcaccgaagcccaggaaacggttgtggaccaggagatcgaacagcagaagccctatcgacctgcccgatggcagagtaacctgacgattttgagttgtgtaagtgttccctaaatgcgccataggagtatcaatcaacgcacagtcatgctcattagcccctacagtacatcgccaacttcagcgacggcttccagaacggccttgcaaatcccacaaatgtcatcttcaagcacctgctag

SEQ ID NO: 27274 - DNA, 306 bp, Emericella nidulans
atggtgaacctctggggctccagcggcctgcccggaccagtgctcaagatcacagcgcgaggaaggactggaccggccaatttcaccagctccatccgcgctggactgctcgcggcgtacggcgactctcatccgatcagtatgggcggcgtatttctcctcaaggcgggaaaggccagattccatgtcatgccggactttcctgctccagagacctgccgttcaaagatcggaggtcctagagcaggagtggctaaagtatcataccagcgaagcgccggtggtttgcttgaccgtcttccatag

SEQ ID NO: 27275 - DNA, 510 bp, Emericella nidulans
cgaataggaagtacgagaggttggagaaggaaactgatgagttgagaaagcagctcaacgcccacacagccagcctacaccagatccgcgaatccgctactacaatgatgcccaggcccaatcccgcggacaacgtcaagcgcaataaagcaaccggtgtctgcattgatgcgaacgatgcggagattagttgctctaacggagctgagagtctgcagctgctgtttcaagacatcgcttccgacgggctacctcacctcactgccgctacgtctgagagtcctagctctaacgggtcgaagcttccagagatggtgccgggatccatctacaagaacacagccagtgggcagacacgtctccagccattgcagccgcccgtcggcatgggacccgtcgtgtcgaagaagaagaaccttgccatggctggagttgacccggatcgcacgctaccgcgcaccctaggcggcgtcactctgagtggcgatgagatagacgagatatttatat

SEQ ID NO: 27276 - DNA, 222 bp, Emericella nidulans
atgtcttccaccaacaagtcctctccaaagaccttcgacgacgcttcgtcgacctactctacagcctcgacttccaccgtcatgaaagagaaggaggaggccaagcacaagtggcagaacaagaacaagagcaacgccagcaacgccagcaacgccgactccaagaacaaggacgcagccctccattacgaggccatggctcattacctagctttccgataa

SEQ ID NO: 27277 - DNA, 534 bp, Emericella nidulans
atggccgatatcgaagcagaagtccccgaagccggtcacggtcacctcgacgaggacgctactcgcgggaccgttctcgctcgcaacggccgagccggtcatactcaccagttcctgcagctcctgctcctgctcagaaccacgcgtactcgcagcagcaacacgactcctacagtcaacgatcattcgctccacaacctcatcctcaagcgccacaaatccatcacgtaccgccgcagaacgcatttcctcctccaccaccgccaaactatcaaggcgcgtggccgccgcctcctccaccccaaatgcccaactttccgccaccatttccgcagatgccacacatgcagatgccaccaggtcagattccgcccccgccagggccgccggggtcatatggttttcctcctggcggaagaggctggcatcaacaacctcctccgccgccgccgtccggacggggctggcggtagctatgggtctactgtagtgtacgatagtcatgatattgataagctttcaactggacagtaa

SEQ ID NO: 27278 - DNA, 525 bp, Emericella nidulans
atggccaagtcaggcaagaagaataagaaaggcgttaaaaagggcaagagccaggaggatgctccagctcctcagcctgaagttccctctaccgagcctgagcagcaacaaccagcagcagacacacctcaacctgaggttccctctactgggcctgagcagcaacaactagcagcagacacacctcaacctgaagaggcgcctgagctgccaactgcttctacgacaggagaggagcctaaccccctcgctaaatcagaggttacgacccaggttgtcccagagatagtaccagatctcaaaccggtacttgagtctgcgccggaaagagaaccagagccagagcaaacgcagaacatcgagcaatcccagacgccgtctgacccggacattccttctcaaacaccgctcgaagacaatgatttcactgaaataaccaaacacgacacttcgtcaaatcaacctcccggtatgatcgatacccagattgagcacaaccaggaacctagccacgacgatctaggc

SEQ ID NO: 27279 - DNA, 307 bp, Emericella nidulans
atgcgtttcctccctcttctcttaacagccggcctgggaagtctccagctggccgctgcccgctgcggtacccgcaacccctcagagcgcgtgcacgctcagcacaggtacttcctcgatatggaagaccgggaggctgcggcccgcgccagtgtcggcgtaactacgcgcgaggccttcgatgtgacaattgacaccttcgtgcatgttatcatcaccaactccactgccgggatcaatatgaccaccttgccgtcccagatcgacgagcaaatcgacgtgctgaatgagaactacctgggcactg

SEQ ID NO: 27280 - DNA, 321 bp, Emericella nidulans
atgccgggattcaccccgacaaggaggagcgtcagatttggcggaatggtgtcgcggagaagagatgtcgaggcgggaagagaggacggcgaagacgtgtttttgcgtggagttgagctgccgcgggagcgggagcgggaatgtcttgggattctggctgacggtgttggtgattgtgattcaggcgcagatctagaagatgtcgatggaactgtgagagagggcgaagcagaagaggatgctggtgtcgatgagcgggactgggagcgggtgatgcggcgggtagccgtgattccagtcgtcatcgctgatacattctga

SEQ ID NO: 27281 - DNA, 373 bp, Emericella nidulans
gcctatcctgcaggcgcgcgtccgccgctctaggactgcaccgtccggcctggagtatcatgtcttcacgcccaaggggatggccaagtatcttgagcgccaacagtcagctcctgatcatctcaaagactttttctgcttagacgagtcttaccgatccatcactgactactgcggcggatttggggtgggaccaagcgcccccagtcactcatacaacgtctttgtcgctgatgcggcagatccagaggacgaaaagcgctgcacggcgttcaacggcgtgcaaaacatgcaggagcttctcgagacggaccggccacaaattacagtccaggtaacccggtttagtgatgctaccctgatcaccttctct

SEQ ID NO: 27282 - DNA, 330 bp, Emericella nidulans
atgaagcaaaccctattctcgctcatcttcatcccgctcctcgcaccagccctagccctagtcgcgccgaaacttccaactggtcttggtcttgagaagcggcagactgtgagtatatactttattccagcatctgtttaccttattttctccgtccggtaggcctatagtcgagaaggagtagagtatagattttctctacataacaaacatcttacgctccctgtacagccccactaaacaactatcatactatagcagtgctccatgcttccctgcgacgaaaacacagcgatcctctgcagtctcctaaattgcgggacttgtgag

SEQ ID NO: 27283 - DNA, 245 bp, Emericella nidulans
gcctaagggtgcgggattagacgtcgcgaggctcgtcgtggacgaagaggccaacgctactttggtacgtgccccgactgtggttggtagctaagctaccagcgacggtgggcccagatacctggaacaagtggaactttggagctgacatgttcgccatcttttagccgaactttattgagaacacaaaagaccccattatcatcaagcgtgcggttatcacaatcgcccggagccctgaggaa

SEQ ID NO: 27284 - DNA, 225 bp, Emericella nidulans
atggagaagaagaaaataccacaactcaaccgaatccgtgaggcatacagaaaacccactttgcgaccttctaatggcgccggcgaaagcgtatcggagggagaggctgtgctgcggcgcctgcaacaagcagaacagtttgcgcagtatgcgcgcgcacagaggatgtatgcgatgcttgttgaccggtataacccggactctctgatggacgaggaggagagg

SEQ ID NO: 27285 - DNA, 903 bp, Emericella nidulans
atcaaaagtggttccgaatggatctctacaccgaagctggttggtgctgccacagaaggtggcagtggtgtctttgaggtcaagtacttcaagcgaaacgcatacctggcccaaagcccacaattgtacaagcagatgtgtatcgctggtgacatgcagagtgttttcgagattgctcctgtgttccgcgccgaggagagcaacacgcaccgacacttgaccgagttcaccggtctcgattttgagaagactttcagctctcactatcacgaggttctcgaatttgccgagcagctcctcgtattcatcctttctcagctcaaggagcgatatgcggaccaaattgccattatccagaagtcctaccccaaggcaggcgatttcaagctccccaaggacggcaaggccctgcgactgaactatatggacggtgtggcgctcctcaaggaggcaggcgttgatgtgtcagaacaggagcgcttcgagaacgacttcaccactgctatggagaaacagctgggacagatcatccgcgaaaagtatgacaccgatttctatgtgctggacaagttccctatggctgtccgccccttttacaccaaggcctgcccccaagatccccgcttctctaactcctatgacttcttcatgcgtggcgaggaaatcatgtctggagcccagcgtattcacgatgtgaaggagttggaggcctctatgattgccaagggcgtcaaccccaaccaggagggctttgaagactaccatgctgctttccgccagggctgccctccccacgccggcggtggattgggtttgaaccgtattgttatgttctttcttggattgccaaatatccggttggaaaatctgttccctcgtgacccccagcgtctgcgtccttaa

SEQ ID NO: 27286 - DNA, 525 bp, Emericella nidulans
gcaactccgcccaagaaagccccggcgaagaaaaagggcgccgctgcggctgtcgacagtgattctgccaacgaaaatgacgattcccttgtcgaaggcgcagagcctgtctctccatctccgactcccaaaccaaagcgccagcgcaagaccgcccccaagccgcaagttgttatcgagaacgaagctgaaatggatcagtaagtatggcaaccttcctccgtgtttaggtcgaccattgtttttcttggaaaacacagcaccgggcccgattatgtattgatataatacagtgactctgacgattcctccctcaagcctgagcagaaacagctcgaggcagacctcaccaacgccatcaaagccgagggccaatacaccccaagacttcatcgctggaaaaccgatgaagaacaaatcatgacggacatcaacctcgatgctgaattcgaggaaatggagcgcaacaagcagttatctgaagcccggcgtagcagtgcaaagcttgctcctttgcctgaatag

SEQ ID NO: 27287 - DNA, 312 bp, Emericella nidulans
atgatacggcacctctcgccggtctctcttcttgtcatgatcctggatggggtaatccctccttcctctccatcgtcacttggcgtcaatgaccggcagacgcgtgccgagtttgccccccctccttctccggctcccagacactctccagatccaagagtccagcttaagacgaacgtgacgattcgtccagctttggtacgccgccctacgatgaggcaaataaaaaaaaaatcagtgatcctgcgggcaatcccgacgacccgggtcaagagaattttccgcctcctcccgttgccttccctgggctga

SEQ ID NO: 27288 - DNA, 274 bp, Emericella nidulans
agacttaatatccagagaagacagcgcctctccatccacaacataatagcccagatcccctcccaccttgggcactgtacttgcttccctggccttcctctcctccctcccgagacagtctatgtcctggttctccacccacgaaaggcctttctcccagtaggcaaaccggttgcctctgtacgtgaaatggaagtcctcccaccgatcctccgcaagggtctgcatatattgcagcgagctgccaggccacagcgccgtgattttgccagtg

SEQ ID NO: 27289 - DNA, 315 bp, Emericella nidulans
atgactgtgaagctaccaccgaccgccaaagacacgtccttcaagcccctcgcctatcctcaccccattcaaccaggctatcctactcctcacgagcacgtcactatagaaccagtgaacacagcacatatcccgtcactttctcgaattacgagcctgctcttgcccattcgctatcaaaactctttctacaccgccaccgttacggatcctgtgatcgcgtccgtctcgcgtgtggccatctaccatgatcacccggccgcctttgcgccagcggcagctattgcccagtcacctacaacaggaacagataaa

SEQ ID NO: 27290 - DNA, 426 bp, Emericella nidulans
atggaggtggtgtcaggatggaaagagtcgcctctcagttcatgcagttttgaacttttcttcgcctgccaccctaaggatagcaagtcccgcggctccctggaaacatataatatcatgcttgaacgatcaaatgatacatttcaatggaaagtcgacgcaaacgagctggaggcaattctagggctatggacattctggctcttgaagtacgatgcgaagtggtcgcagaatggccttggacgagtagtgggattgactaaagaagaggccaaagctgaaacaacagatctatacttccacaagtggattttccgacagagggaggcaatgatggtatcatcaaagatgatgtcctttccagggcagactttcgggtacttttccgatgattacccggatagcaagggagattctttgtcgtaa

SEQ ID NO: 27291 - DNA, 204 bp, Emericella nidulans
cgtgctggatgttggaaacatccagtcacagttttccttgaagttctcatggagtggtacttggagccgtccccaaactgtctgtctggcagcatcctacctttctctggaggtttgtagtcctgtagcagcatcgtcgcgtctacctactctgctaagattatgcaggccctgggctatcatgcctctggctggatacttgca

SEQ ID NO: 27292 - DNA, 1564 bp, Emericella nidulans
gcgtttccatcaatgattacaacgcggagagctatcgccatgccgtccatgaggtggatctaagaggtggttaggatcctacaccagtggaaaactgagtgatgatttagcgacggaccttttcggcgagatctacaaaacaaagtacggtagttcaatcccgaacgaaaagtggcgagcgcttgccgagctcttacttaatcagggtgccacggggcaggtcgtcgacgaagcgctgatagaacgggtcagggctagagacctcgcaagtgtgaagctattgctacgagaaggcgcctctgtagattatgacaacgccgctgctcttgatgatgccgttgcctcgcacaatgaagagttcattgacgctctactgcaatatcagccggcagccgagtccgttaactctgtcttctggcgcgtagaagatcttcctcatagtgtccaagtgcgcatcgcgcgcaagttgctcgacgctggtgcgaatggggagcaagtggatagagtactgaaggtggccatagcccccttggctggtgaacggaaccgtgaacttatcaaggtgcttgtggatggtggtgcagacgtcaaccagcgaaatggcgagctacttcacctagctgctcaatctgccgacatcgagacactacagatcttgctgctcgggtttccttcgcccacaattctttcaacatgcgtaccgcttgccatgaaacattgcgaagcccagagatacaaaataatccacatgcttcttcacgcaggtgctcgtggcgatgagatctcgcaagcattggtagatagtatcgacgggaccacatccgggcttgatctagccctactgctgctcactaccggggaagcaaacactggcttcgagaacgggagatctttcaagaaagcaatagagtcgagcaatatcggattcctagaactcgttgcccaatataaccatctccgggattccgatttctgctcttgtctccttgctgcgatagacctccaccagcgggatagaactcgtctggagaaaattcgcattcttctcttgagcggtccagatctctcagggaataccgggaccgccgcacttcgccatgaaatggaaggtttaaagcgacgatccgaatcgacgctaggagttttgcacatgatacttgaggcaggagcggatgtcaactaccaacagggacgcatcttcgttgacgccattgcattggacatgtttgactgcttcaagttgttcctaggcgtccatccctcatttcaatcgctggagctggctttcgacaaagctctgttatacgccactcctaccaacgaccgcgcggccgacttacgatacctccaagaattgctcgctacgggtgtgccccaggcaactctggacaaggcgttattgcacagtaccgataagcaaagcgaacaactggttcttctcctcctgcgatacggtgcatctgtcaattatcaagatggagccgcagtgcgcaaagctatccagaaactggacgttgagctgcttgcgcatctgtgcgccacgagccgaccgtggaaacgttga

SEQ ID NO: 27293 - DNA, 210 bp, Emericella nidulans
atgccgaagcgcggataccaccacccgaggggcgaacaggaacaacgtacctttcccacagcggcctccccgagaagtaccagtttgacgctgctgctcggttttggcgcatttgcgggcgttgattcagacattgtggacgaagcccaacgaagagacggttatatcgatcaggtcgtcttgcagcaaccgctgggttatcaatcgtag

SEQ ID NO: 27294 - DNA, 359 bp, Emericella nidulans
gtctcccagccctgacctcttccgcgcactcgcatcaattgcgaccctccgccctgacacgcgtctttacgttgctaagatcgatggaaaaatcgccgggacagcaggactagcactcatcaccacatctcttggcaaagttgcggagctgtatatcgacagcacgcttccagagttcagggggaggggcgttcaagtggcattattgaaagctagacttgctgaggcgaagagagatgggtacgatattgctgctgtgacaacgtggcctggtggtgtgagtgcgaggaatatggaaagggtagggtttaagctggcgtataggaaggatgtttacactcctggttctcctggttgtg

SEQ ID NO: 27295 - DNA, 369 bp, Emericella nidulans
atggcgaacgaatttcgggacaaaattgtcaacgaaggactggcggcgtcgagttctgttgcagtcacaagaagttattcctgtgaagtcaacaagaccgcgcgagacgaagcaagaaaaaaatccaggggaagcggtagatcaggagcacaactggacgtgcgcccagggcgtttcaagaaggtcaagctaggagaagaagcggactgggtgtgtagaagcctcgagagtcgggagattatcgagagaatagaaaagggagaggggaagggaacgaagaagcgagagaagtggaaggacgatgaggaggcagagaaaggcgatcccaaagtgggaagcgggaattggaaccacggggcgggtacctag

SEQ ID NO: 27296 - DNA, 474 bp, Emericella nidulans
atggctggaaggctgagcaggggactgctgggggacagcgaagtcacgaaccgatgcggtttcaaagggcaaacgacgccaggtaacgccggaacaaggaaaggacccgggccgagacgggacagaggggaaaacaaccaggggaagaaacaagatgacaagcgcacaggggcgaacgacacaaggaaccggggcgaacagaagcccaggccacgaaccggaagggacccccaaaacgggaacccaaagagcgccgtgcggaatggacggccacaggggaaccccagacaagcctccccaaaaagccagaggaccacctctggaacaaaagagccgagccctcagaaaagacacccccaagcggggcccaccggaaggcacccgccaggccaaggaaccgcccaaccccccgggcccaaagcaaagcggaactaccccgagaaagagaagcttagcacccaaaaccctttctag

SEQ ID NO: 27297 - DNA, 243 bp, Emericella nidulans
atgccctcgaagcggtcatctcaaggaagccgagcaccccagcaatctcgtatattgttgggggaaacaaagcccggcgccgacgattccatcgagctcaagcgagagataacgcgcttgaaaattgagaacgatctccgtgctcttgcagagtctcgagagattcaacggctccaagctgaggtgaagcgcttgggaaggctcaagacagaattgaacagagcgattgaccggttgtattag

SEQ ID NO: 27298 - DNA, 484 bp, Emericella nidulans
attatggcagacggaatcagcagtcttcctgataagaaaatgcaggaggcactcaagatcattcagagtaacgttccggctcttaaggtatgatatttcccgcaagcaaactggtctcgcatatcatgaactgactgtttttggaagggtacacaagagactgaaattgagctcgacattgatgaacttcccaatgatgttctttggatgctgctcaagttcgtgaagaaaaacgcacctcatgtagttgaggagggacgaggcctcctcgccagttgcccccaatgctgcaccacccaaaccgaagaagaacaagcccatgagcaagtacgaacaggaagctcagattaatatgctcgaaagcaacctctcacgcttccaagggggtgggcacggtcgctctcccgaaccagttccttcactcgaggccaatgatagcagtggtgactctgaggatgattctgaagaaagcgaagaagagtaa

SEQ ID NO: 27299 - DNA, 984 bp, Emericella nidulans
acgccgtctaagacgcccagtccagctccgcccccaacatccgcgtcaacattgacagtcaatcctgattacgcaaatccatctttcgaccccgtcgacttcctcaacgacactctcccgccactgagtctccaatcttcacagtttcaatcccaatcaaacccgcgtgccgtcaatctcaccgacctctccactcgcgtccaatctatcctgtcacaaaccaatgcccagaacatccgccactcaagcacgcttacttctcttacggatgaaatcatccgcagcggcaaccggctcgcgtacgaagtcgaggttcttcgcggtgaggcgatcgcactctcggacttgctgacggaggggctggcagaggagattgcgaggtttactactacgccgacaattccggaggagaaacccgaagacgaatcagatcccacagagcgaggagaacacgagaggaaaaagagcgaaccggagtatatcagcaaccttcgcaccctgaatcaggtccgggcgcgcttggaagaagtcgttcagaccttcggcgacgcaatggagtggccgcttccaccgtctgagacttcgataacgtcctcgttcatctctgtttccgcaccagatttaggcccggacagtcagacgcgtgaggagaaaggacaggaagctgcaaagaagctacgtggtgagatcaatgagcttctggatagcgatggtgggcttgaagctgcagcgcgcagggtggaggctctacggacactatctttggtgtggaaggggacagcggaggagaaggcgcgggtgaggtttgtggacggattagcaaagctcgtcgaggagcggaggagggcagttgaggctccgtcacagagtcaacagacacaaatctcggggtcgagggggcatcaaagacaggagagtgaggggcctgggggcgggatcttccgcaatctgcaacggttacgagaggagatttacttggaatga

SEQ ID NO: 27300 - DNA, 611 bp, Emericella nidulans
atgaagttgaacctcaactccctcctcgccctcacccccctccttggtctcagccaagcagccgactgcattgtccccaaccaacaagtcttctcccaagcagcggtcgagatgatgtggtccatccgcgcctggctgtgtcccaacgcctggaatcagtggatcttcgcgtatccagatagtgcgtggtgcgacgcaggtggtggcatcgtcagcgcgttctacgggtcctgggaaatcctcggtatgcagagcgagcagcagtgctgggtgggcttttcatttcctgcatcgttttaggtgcattctgtcataatgaagctcgctaatgagggcaggatatcactgaggaaatcatcaaccaatgcatgtggtacggctttgcgaagcacaagctacaacggtggaacttggtcgtacggcgatatctgggccggcggctggttctgggcggataactcgcggagctgtgtgcatcctgtcaagagagatgcactgcctgttgcttccgttcctgttggggatatcaatgctgaaatgaacggtaccacccttgctgatgggatgagccaggtcggcagtcgactatggctggatttcagtccgacgag

SEQ ID NO: 27301 - DNA, 533 bp, Emericella nidulans
agtctgatactgcaactgaatcgccatcgccgctttcattccccgcctgcgtccccatcgtacccgtcgtggtagcaatttaccccaaagtcctacgcacggcctttgttctgctgaacctgcacttgcccgattcccatctcatcagcgaatttcgcgcaacaatcacctcccttggccgtgaatccgcaacgctcggccttaccactagcctcttcaatgacatgctctatttccactggcgcgtcacgcatgatttccccgaggtcattgcgttatgccgcgagatggaagtcactggtgcgcagcccaacatcggcacgatcaatatacttgagggtatcgtgcgcgagcgcaatgaagacctcgtgaagcgtcagtcgggcgagacctcggagcagccatggtgggatttccccgataatcggagggctatgcgtaaattgttaggggaggacgggatgcttgagaggttcaggaggcaatatcgcgaaggcaaggagagaaagaagatttggaagccgtacctctaa

SEQ ID NO: 27302 - DNA, 777 bp, Emericella nidulans
gatctcttcctcacagagacggcagcaatcgcagacgtcgtcctcccaggctcccaatgggccgagaagaccggctgcttcaccaacgtcgatcgcacgatgcacctgagccgcaaggccgtcgacccgccaggagaagctaaagctgatctcgacatattcctcgattttgcgcaaaggatggactttaggaatagggacgggggtccgttgatcccgttcacgaatcccgaggaggtgtttgaagaatggaagaagatgtcctacgggcgcccccttgactgcagcgacctcacgtatgagaagttgtccggcgggtctgggatccagtggccatgtacaaaggagtacccgtttggtaaggagcggctcttcgacgatggcaagttcttcacggacaccgactactgtgagagctacggccacgacctggagaccgggacgccgctgacgaaggggcaatacgaggcgatgaatcccgccggacgcgcgatattaaaggcagcgcattatcggaagccgtgggaatcgccagacgaggaatttccattttacctctcgacaggccggaacgtattccatttccacacccggacgaagacaggtcgcagcaagaggctgcagaatgctgacaaggatgcctgccttgtcatctgtcaggcagatgcagatgagctcggcgtcacgaatggggagatggtgattgtcagatcaaggaggggccaggttgagctgcctgtaaagaccgaggggatcctaagctgggtctccctatag

SEQ ID NO: 27303 - DNA, 329 bp, Emericella nidulans
gatgctgctcgatgtacccgggaatcacaagcggtctctggcttgaacgcaggccagctgtgatggctgctaagcgtctttttgagagccaccccttcttcatcgtcgactggggtattgaatgcgctaaacagctctattggaactggcgcacaggcattaaggctccagacttgcaattcacctgctgctagggaagacccgagccatgactggggccgagcaggagcgacccgccggttctcacacatcgccgacgcagtcattgcaaggaataaaaatggagattgaactggtcaacacgagcccgaatagacacagtcctgaag

SEQ ID NO: 27304 - DNA, 282 bp, Emericella nidulans
atgcctaacaacaattggtcttccaacacctcctccaacgactccggtgtcacgggcgccgctaaattcgtcacatccacacttggtaacactgtcggcggcgtctccaagaccttggggggcgttacgggcgccgcaactcgcggactgggcgatacagtgaacagtgctaccggtagttcggggaggcctgttggcgatgctctgggaaatgtggggacgggattggaggatggacttaaaaggttgggagggggtcgaggatgcgggacaggggaataa

SEQ ID NO: 27305 - DNA, 226 bp, Emericella nidulans
cggaaaacatcgatggtactggttcggccttcgccgagaccaaacaccatttaaagggctttgagcgggggagagatatatcgggtggatggtgcgttgatggagatggtcagttcattctcttctcaggacgggaggctgtggaaaagcataattcttttgctcagagtgaggggttcaaagagtttggccgtatcagagactatgtcgaggaagttgagataaa

SEQ ID NO: 27306 - DNA, 249 bp, Emericella nidulans
atggcggccataattatgatggccaggagtcgacatatccagagtgacttgttccaactcggcagctttttcctgacggagagctatatgaaactttatcatcttgaaaggcggcgccacaggacctctaatccagccatctggggctctctggagccgttcgacagtgacataaccaaaatcggcagccacgacattgacgaaacaagcaatgacaagggagagtgttcccgcgagaaaagagagtga

SEQ ID NO: 27307 - DNA, 505 bp, Emericella nidulans
gcgatacgtgccacgaacaagctggtcgctcactatgagcaacgtctgagcaaggttccctcggcgagcgagctcgaagaagggaagaccctcatccaggagctgacaacgagtgtgaaggatggtcaggagcatgaggtttcgttccaggtatgcctcggttatgtcttgtttgtatatattttatcgatgatacgatgactctgacctgactatggtttcaggcggagatcgagaggttaaaaatggagttgtccacttcgaaagacctcgagaaaggttatgctgagaagatcgggctcatggagatggaaatcgggggattgcaggttgacaagcagacagcgagaaaccagattcattgcttggagcagaggagggaggagctctccaaaagggtgatggaactgacttcgactgtgcaaggagcgaagaaggcggttcacgatgctaaggttgaactggccgctgcgtattctaggttgctggctgggatcaaggaaaa

SEQ ID NO: 27308 - DNA, 579 bp, Emericella nidulans
atgtatatcagttcgcggatggacatgatcgaggctttgcgaaccaaagaacgccttggtgtaaaggatccccgcaaaaaaacccgcgttaagctgcgtattaagacaagcggtgactactttcgtattaatacgattttgaagcggataagccatctagattatgtgaatgatatcgaccaggttcttaagaacgcgggaagggaacggtcgcagcaaatacaggccgagatcgagtcgttgaacaaagtgaggaacgcaaaagagatcgtcgaaataaatgagattattctttggattctgtacggcagggagtggctgaaacctaagcaggtggctgcggtgctgtacgtccagagtggtgagctgtcgcttttgacgctcgaggcaaagttgcagctcaagtatacgctttttgaagttgatagtgacggggatgtggattttcgctcctacgagattgtcgacttgattcctgagggagatcagggccagctttcaacagcggaaaaacaccgtcaaacaacaaagagaatattgcccgaggaaatcgatatcatacgccacttccttcgaact

SEQ ID NO: 27309 - DNA, 317 bp, Emericella nidulans
atgcataagaaggctacactggctctcgccagtgcgatctgtatcacagcagccacaggcctcccaggtccggtcctggacagcgcgccgaaagcgagcgttcacggcagtgttcacggcagcattctaggcaccgccgccgatataaatgatccatcttatttgtggaccatgtatggtctgaacacatcggaggaatacaagtactttcaggagccggggaatgacgagatccacgcccattatgactcgcgtttcttcaaagatccggttcctaaagagcaccgttcgcaagtcttgacacatatcatccattc

SEQ ID NO: 27310 - DNA, 255 bp, Emericella nidulans
atggctctcttcgcccctgcccccacagcctcgagcatctggacctggcgggagctgaccccctcgttagactccccaggatcgttcacttcgaacgagagcgtggatctctcccgaagcgacgatctatcatactttgtcgcggagatcgcgatgcggaaaatgctgcagcgctgcacatgggcgacgacacgctggcgcagggcagacacgtctacgcgcccatcgtcgccgtcgaacttgagcgccaattag

SEQ ID NO: 27311 - DNA, 224 bp, Emericella nidulans
ggtatgacgaccgtaccctggtcggcacggtagcgcccctcacccatcctgttactctgcgggttcagtctgtcggatccggatgcgtgagcacgctcggcaccaccgtctctgcagtccagtccgcagagccggtgttgcgttggttcaactgcagcaggaggtctgagccccgccggtaaaggccaccagcaggctgccaccaatcaacggtatacaaggtc

SEQ ID NO: 27312 - DNA, 255 bp, Emericella nidulans
atgagggggggggggatttcgagggatagaggagtggtagaagtgagaggggggaagatgggatgggagagtgagtgggggaagaagggagtgtgccaaagagggacggaggatgaaagagaggggaagagggagggcacgagtgaaagtggattgagggcacgtggggagttcgtaggggtgagccgatggaagccgaagggtgaagaaggagtggagggagatggggaaaaagaggagaaggtggaggggtag

SEQ ID NO: 27313 - DNA, 246 bp, Emericella nidulans
atgacgagccgtattgtgacacccgagacgctagactcactcatgacacgctatatccatatcacagttctagagatcaaccaagatgaggtggatagccctgcccgcacaaacgatgtagtattcaactccaccactggtgttgtaaccaaccagatgggctcctttacacttgtagtcgggacgaaccacggcctgggaaggattgcaaacaccagaatgagcatgatgcatcggcagaagtag

SEQ ID NO: 27314 - DNA, 249 bp, Emericella nidulans
atgaagctgctattcaactctctctcgctggggtatgacttgccaggcgtcctacgcgcgagagaatactccagaaatgtcgatgagcgtatccctgagggcaaaacctggttctggagcgacttccgcactcaaacacttggtattgagtcactaaatggtgaagatgtcggccactatagcgaaacacgggacgtgaagatgtggagggccaactcaggatcatcgatggcaccgcagccaggctga

SEQ ID NO: 27315 - DNA, 258 bp, Emericella nidulans
gtctccgcccttgtatgaagcaggaaccttctttctcgagcgtgggcctttacaatcaacagggccttactcacaagaatgtgcagcgtacatcatcgtccattttgttcggcccactggcggttgcaatcgacgtcgacgaactcagctttgattatccgttgactgtaaatacaaccttcggcgacttagatgacggcctcaccatcgacgcttggatgcggaggggactcagagttgacccgagtggcgtacccg

SEQ ID NO: 27316 - DNA, 396 bp, Emericella nidulans
atgtccgtaaaccacgttcagcccgagcagtacttcctgcccccgactccgcacgttcccaacagcaggcttcctgtacttgtgtaccgcaatgtcctggaggatacaagtcctcgcaacatcgtaaacactatcgagccgaatggctggatcaagggtgggcagtggaagacgtacaaggtgcctcactttcacacccattgccacgaatgctatggaatcatccgagggggatcaacctatctccttggggtcggccccaacgacccgaaggtcgacgaggagggtagtccatatgggatgaagttgactgtccaaaaaggggatgtttttgttctaccggtaagtgctacttcaagcaaatgcggaatgcgtgactacaccggaggaagctaa

SEQ ID NO: 27317 - DNA, 357 bp, Emericella nidulans
atagtccatgagcagccggaagatgagccagtggatgatggctggggcagcatttggggctcttcaaaagataagaagaagtcaaagaagaacagaatcgccgcagagcctccgccccctgcgcccacacctccttccctagggctcgagcgggaatttaccagggactccgagctcgagagagaagaccctatttgggacgattatgacggcaagcccgtaaagtcgaagaaggaggagacccctgttaaagccgtcaaaggattctgggccagcttgggagcagctactatgggaagcagtaaaccaaaggccagcaagaagaaatccgaggagaagcccagagaacctgacccg

SEQ ID NO: 27318 - DNA, 378 bp, Emericella nidulans
atgggagttccccgcatgccaactaatacgacaaagcttcgcaccacctcaaacagctatctccaaccaagcaacaaatatccagcgttagatacaatgtccctccaaggcaaagtctacgccatcactggcggtgcaagcggcatcggtctcgcaaccgccaagctcctttcctcgcgcgggggcaccgtttgcatagccgacgtcaacccgaccactctcgccgaagcagaatcctatttcagctccaagacacccgtcgtccaatacacaatcactcaagtagacgtctccaacagacaacaggtcgattgttggatcgcgtcgatcctaacgaaataccagcgtcttgacgcgccgccaatatcgcaggcatag

SEQ ID NO: 27319 - DNA, 254 bp, Emericella nidulans
atgccagcgatgaaaatcctcatcactggcgcggggatcgccggcacagcgctggccttctggctctcgaaactcggccacaacgtcactgtgatcgaacgcgcttcttcactgcgcgcaagcggattgcaagtcgacctccgtggccctggcatccaagtgcttcgccggatgaagctagaagaaacattccgccagcacgctgtcgcggaacaggggcttcaactcgtggatcgaagaggccgaagatgggg

SEQ ID NO: 27320 - DNA, 621 bp, Emericella nidulans
atgtggatattggtcctgccgctgccgaccatcctgcggctgcagctatccaggagtaagaagattcggcttagtttgctatttacggtgggactggcgtacattatacacccatatggaagtggatcgctgaggctaatgaagtcagaacatgcactgtcagtgccgcgcgcctctcagttgttgtctcgcagggctccacagactttacctgtaaggctatcaccctcctgacccttctggatgatccttacatctcaggggccggcgtccctctgggcatcctctccgtctgggagcccctaggcggaatcctctgcgcaaacctgcctctctcgcacaagctcgtcttgagcgcattccggaaagtcactggccgcacttcctctgagcgtaaccatctttcaccaaccgggccgcgcagctggtatcgcctcgagaattacctccaccgaaaggcaaatcgaaatctagagactagtacagatacttactatacaactcattcatatacagattcgaccgagatgggtggtatcgttgtccaacggaattttgagcaggtttcctcgtatacgggtgttgatttactgcggcaagaggaagagacaggagtgccag

SEQ ID NO: 27321 - DNA, 255 bp, Emericella nidulans
atgagggaactagttaaaaagaatgcggcggctgtaacagctgctggagccgataatgaaagtgcgggttttaactcggttgatccggaagagagtcccactaaaaaggctagggatgagtccaaagggaaggaaagaatggctgttgctaggaccaacgaatatgctgatagtgatggtggtgaaaatgaaggtatcatgatggatgctcttctgaatatggaaaaggaggcttctgatacggacttcgactga

SEQ ID NO: 27322 - DNA, 357 bp, Emericella nidulans
atggaatggacctcccacgaaatctgccaactcaacacacctgtccccacggcctctctggacattactggcaatggcttcaatgatttgatcgtaggctataattttggtcctaccatgatcaactccaatcctgatggtggtgatattatatggctggagaacccgggcaacaaccccaacgcggagtggaagcaacattttattgggagatggccaacggtccaccgccttgcagtcggttactttacccaaaggacgttccctgaggtcattgccgcgccggtagtacatgggccatacgataaggcaagatcccagtggcatagagataccccggttactaacttgctatag

SEQ ID NO: 27323 - DNA, 383 bp, Emericella nidulans
atggttcgcatcgttgaaatcatggcagacgaagatacgcgcaacaccagcatgctggagctgaacgagactgtaaagctgaacgaaggcgagaatggagaaacaaatggccctgtacacccacggaaaggaatgccggagtggaaatggaagggcacccttgcggtcatcttgctgcagactattattagcggtatgtgtgtcattatcctgcccccctcaaccttactcatttaacatgtgctagggtacgatgttagcaatgtcgcgaatatccaagctcgcctgtatgagacctttggaaatatcgagcttctgccctgggtgggtctgtcgtacagtttggccaactttgcgcttatctcgctgtcccgcaagatctt

SEQ ID NO: 27324 - DNA, 1349 bp, Emericella nidulans
atattggatatgtacccctggaaagctctctcgacatgggcccccttcgaaatcgacgctctcggtcttgtcactctcctcggcgccaacgaagttgatatcgccgtcggccgtttagcgcccagctactggctggaatatatgccgctgctggcagggttcgtctttgccggcgatcgattccgcgctaaacagcctacgttcacgctatataacgtgtccagcggcatcgtgacaggaacctcgcagcgtggttcacgcggtggatgcagacgcaggaattccatgtctcgcgcagcctcgtatattgggaggtcgacaagacgccccggccccggtggatgtatttcatcgtcccagccctaatctcagctaccttcaatggcttcctgcttgccatgacggtcttgtctggcgactggtacgggtttgcgaatacgatagctattatactcctcatcatcgtgcgcgcatacatgattcaggagaaccgccacgcaatcaataaaaccgtcgcggctgcaaagccccttcctaccacctttgcaggcgcgctagaagaatggaaagagaagcgcaagagggatccgcaggcgccggcgctgcggcgggactcgcgacagtggcgaccagaggtcgccaagatcctcgtcgtcatgcctgattcgcgagccgtcacgatgtttatccccgagcatctcctgcgcggtgtcttcgtcaccgagacgcccgtccggtcacccgggatctaccggctgttgcagtggaccggctgggtggcgtttaccgtccacgtcgtcacactaggcatggcccaattggcgacccagctatatgtggtcgcactgatggtcattccaaccgtcctgatatgctacggctatggttgtgacgactctaggattgcaaaagggtggcggtggctattgggggaggaggccgcgccgtacgtctaccaagcgggaccgcagctaaaagcaactgtctttgagtggccggaagatgtggaatttgccagggatggcaagggcgtcttgtacagacgcgatccgggaccaatttctccggacaagcgatcaaccgcccgtcaggacttatacgcgtggctgaatctgaccgaagaggagcagaggagcctctgggactggcatttgctgcctcatagacggggccacgatgactcatggtggaatatctttaacgagaagcagaggctcattagggagcgaccgccggatctgaaggccctcaaggaccgcattcaggatgagctcagagcaccaaggttcaagcgcagagtctcaaactggcggtataaggatctagatgttgaaaaagggtttaagtag

SEQ ID NO: 27325 - DNA, 342 bp, Emericella nidulans
atggcttccggtctccttacgctttcgcgcacttctgcagtcggaattggcctgggtctcgggctgtccttctcgctcctccattcgtctccctttcgcacagcacccatgagatgcgaatatgcaactccgagtatcggctctacagggcccggctggactgtgtccaatcaagatccgttaaggaagcagggcgcggctcgagaaagcggtatcatgactgcgtcgaacatgcgacaggtgagcatgggaagcgtccttggccttgttgttggagttggattaagggcgttctcgcgggtattcgtggtccttttcggcatggggattatattggtcgag

SEQ ID NO: 27326 - DNA, 596 bp, Emericella nidulans
atgcacgagcttctgctcttcgcctcggttccgtcgcaccaacaccatgagctgttgcagcagcttactgggctgacagccatgcagccccgtcactgtctagaacggcgtttgatcttcaaggccactagaaaacctgatctcgccaacatgcgcagcggcactggccagggtcctgatattgtacggctcaataaaatgctgaatgggcagatgttctacacgcaggtcgtcggccctctatccgaggcagatttcgacggaaaaccgtcgtcatctgatagccaggatgtttccatgtcggggacacatgaagctgcaggtagctcctacgactacgacagccagccgtggaggctcgaatttagagacactcctgaggcaggcttccggtcgaccatcacggctcggctggcggctagcgctgctctaccgaaaggggatgttgtgccttctatgaatgcctggggatataggttagtactccgcagctattattcgggctcattcggatgggcgacatgggttgttgacggttctacagtttcgtaaccgagtatgtggtggaaggagatatgttcatttacaacgacatc

SEQ ID NO: 27327 - DNA, 231 bp, Emericella nidulans
atggtcagctgtcccacctcctcactcattctcgatcgaaaatatgaattgtctgatccactctccatagctggtagcattgctggcctgattgtcctagctgaagaactgttccaccttgtatataagttcaaagacgcgaaggagggcatccaaaaaatatgcaaagagatccagcctctcagtgctgctttacgatttatcattgcttgcaaaatcattcgagtctga

SEQ ID NO: 27328 - DNA, 387 bp, Emericella nidulans
atgaccattcccgccgaaggcctcggcgaggtttgcgccaccggtcgccgcggcagtgaaggctggcttgatctgtttgacggcgacaagaagatatgcgaactacactgggataaccgtgccgagcggcgctggaatgactttgaagtgctggagccggatgagggctatcgagttgagtgttcggggtggagtagcgagaggggtccgcttggccatgtctttgtggatgtgagtgaagcacggaaggaggaattgcgcagggagaaggagcttggcgggctgagggtctttgagggccctggggtcggcgagaagagtgtggacgtggatgtggcggaggaggttcctgtgttgggggggttgggggggatcggtgggaagtag

SEQ ID NO: 27329 - DNA, 234 bp, Emericella nidulans
atggctctcgaagcgccgtcaaatctagagactggtcattacagggacagacgaattgctgcacagataaccagaggaatgcaggaacctctcgaaacaagtcagggagaaaagcctcatttgctggtatatagttccgtccttgtcttcaccaccaagccactgcaactcctcaaggcacgagcacacaagctaaacaggagtttgcgcgggcgactgttgggcaaagaatag

SEQ ID NO: 27330 - DNA, 230 bp, Emericella nidulans
atattctgaagctgcgaacattgctgagggaataatgaacactcatcctttccaggatgtgccatacatcttcttgaggaccatcggacactaccttccgaagtactattcgcggatgtatgtacaaggctcttgcatatgctatcaggtaacctatgcatttacaggtactttatgccacagttagttaccctgaaaacacactggcgtatgaggcccatgcttaatag

SEQ ID NO: 27331 - DNA, 423 bp, Emericella nidulans
atgcaggagctgaataaccctcggcaagacaactctcgcaattatctcaactccaaaactggcgcctggttcttaggaagcgaatttgcacgtcgatccggccctgaacacggcattgtcagtgttgcaatgaaccctggtgctgcccgcaccaaccttctgcgacacgccggatggactaagtttctcagttggccgttgctccatagtccgaagctagccgctctcactgagctgtacgccggtttatcgccggatatcaacctcgagaacaacggttgttatgtgattccatggggccgcattcataccactgtcgccccccatctgatgaatgcgctgaggtccaaacaagccggtggaactggaagggcgcagcagttctgggatttttgcgatgacaagaccaaggattatcattaa

SEQ ID NO: 27332 - DNA, 423 bp, Emericella nidulans
atgtcaatccgagaaagactgcttgcaactgtttcgaaatacattgccgcgtacaacgagttcgatccaagtgctatgaagaccgttcgcacaccaacctgccttactcatggagttgcaccgacctgcaagtttactcagagtatggaggaacacacgagacatatgatgttatcgcgaggagtgtttcgatcagtcaatgccagcattgtggacgacaacattacggttgttgatgaggtgtcaagacaagttgtcgtgaaggtgaaaatcaggtgtgaaacgacggttggaccctacgagaacgaagcaatgtttataatggctatgaatgaggagggagctctggtggatgagatctttcagttcttggacacagcccgttttcgccagttccagggacgcctcgaggaggctcaataa

SEQ ID NO: 27333 - DNA, 297 bp, Emericella nidulans
atgtccccacgggcatcttttcacctcgtcgccgaagagaatgggcgtgtcatgcatgggctgacatggattctcctaggccgtttgggtggcggtatagtcgtcctgcgcacgaaataccgagatgtccccatgggcatcgattccacccgcctaggttggatgggcgtgcttcgttggaaagcatggatccgcctaggctgtcccgagtgtgagcgaggtgtgagtgtcgcccatgggcatcgacaccttgcggctaggaactggaacgagacgggtggcaaagatttcgagtag

SEQ ID NO: 27334 - DNA, 351 bp, Emericella nidulans
atggtcgaccaggggttgaaatcgtcgaccaggtccgagacttcatcgaccgtgtccgaggagtggtcgaggatttgtcgaccaggagttgaaatcgtcgaccgggtccgagaattcgtcgaccaggacggcggaaccctcgaccaggacgatgaatgggcgatgaaaatctatcgggttcgaggaatggtgcgacagaagttgaaatcgtcgaccgggtccgagaattcgtcgaccaggccgaggagtggtcgaggatttgtcgaccaggagttgaaatcgtcgaccgggaccgagaattcgtcgaccaggacggcggaaccctcgaccaggacgatgaatgggcgatga

SEQ ID NO: 27335 - DNA, 309 bp, Emericella nidulans
atgctccgctacacgatccacattaccgcccgcctagcgaattacagaaacaccatggaatatgaaggcggcatggtcctggagtatctgcctctacctgagcgtgaccgtctgtgtgcaactaaacgggcagtaacgctggcggagtggaaagcttttttccagatcctgcagtttcgctgtggcgtcctcttgctggtgctgatgctggctactaatgtttttctttatccggggtcgattgatgccgtcgtcggcagtgttccactcggtttcaggggtgggctgaatcgggtttttggtgtataa

SEQ ID NO: 27336 - DNA, 276 bp, Emericella nidulans
atgacacgtctgaagcgcgaactgttattcctgagcagctctaacgtaagaagagtaagaggttcaattattcgcgtcgaggcaacggcaggggctcttttctttcacgagagggaaaagaaaccagagggagagacaggacggaaagctggtactggtgaagacgaaaaaggaagagccctgaagcttccctccgcgaaatggcgactaggaggttggggagtaagacacgagaacgaatctacggaaaggaacgaaaagagcactgggggttaa

SEQ ID NO: 27337 - DNA, 333 bp, Emericella nidulans
actcttctgcagacgatccctgacggtaatgcccggtttttccctgcggacgtatccaagtacgatgagtacgcgaatgtcttccgccaagttcgcaagctctggggccgtatcgatgcactatgcgccaatgcgggcattgtcgatacttcgtccgtctatatatacgactggaagaacaggagcgttgatgacattcctccggcccccgagttggatgtcgtggacatcaactataagggagtaatctacggcactcaattggcgactcacttcatgagacataatcctcgacctggcggtcgcattgtggtcactggcagtattggagcg

SEQ ID NO: 27338 - DNA, 256 bp, Emericella nidulans
gccgctttggggctccggcgtggatccagttggggttgtctttgggctatttgccagtgtcatagctcgttctgtagggagtatctgcctagactaatgcccaacgtgtgatttccaagtcttcactctaaccaaacctggcagccgactattgctgtagcgtaacaatagacttgctcctagcatgtctacgagccacgctggcagcaggaaataactttttcccatatagttggcagacaactgggtgcactaa

SEQ ID NO: 27339 - DNA, 348 bp, Emericella nidulans
atggccacctacggacgaaatgtcctcaagaggcatgagaagatcctcacaggctcgtctgacatcggtatgcgcgatttgtatctgttagaacaaacggcagctaataagctatcaggaaacgtcagctacatcatgcccacactccacgctatatttgccatcccagcaacgaatggatcgttccttcaccatccgtcgtttgcctcggctgcagggacagacgaagctcacgaagaggcgctggtggtgggcaagaccctcgggttggttggctgggaaatgctcacaaatgatgagctgttcgagcagtccaaaagccaatggcagaaatgcgtgaatgaatag

SEQ ID NO: 27340 - DNA, 816 bp, Emericella nidulans
atgacaacaggagtcgagtttgatgtgatccagtcttccataagcgcaacgactaccatctcatacaatcaacaaaccctcagggtcaatatcaataacatgtcatccacactgtctactccgtcattgtctcagtttccgacgccgaaccaaacccccaggcttcccactcccccgaactcgccagaggaaacgcatccccatatcatgagtgcggaagagaacgaaattcttgcgcaagagtctacgcggctgactgaatctggcgatgatttcgctccaacgatcacctcactcctgaacgaatataccgacagaatgaagcaaatacagaggcggagactagctgaacagaaaggagaacatgagatactttatgcaaaacttagaagacaaaaagactcagcgctgtctggtctgaagcaggcgcaagatcttaccaccagatacaagcaggaacttgacgcaaaagtcattgaagaggagcagctcactgagaagatgaaaaccctagagaagctgcttgctgagacagccacgcaacattcagacactaagaaggcgtatgctgagaaagaggaaatatggaattctgtcatgggtcccctgtcgaggttagagaacgtcaacggcgaaatccgggagcagctgggagaaataaaacagcagctagaggggaccaatgcttcaattgccgaggaaagagctatcagtgacagaaacctctcagaactcgcttctgtgagagacaaactagctgaggaaaaagtccagcgagccgccgtcgaacgcaggttgaacgagcaagtcgataga

SEQ ID NO: 27341 - DNA, 243 bp, Emericella nidulans
atggaaaacttccaaccgtacgtcacagttcatatcatcactcattgtcgcctattaactggatttcacacacagaacaagcaatgcgatgtcgctatcaactctgccctggctcacaaggcgctcacaaacccatcgaaggaattgtcggaggagggtcgggctctcgttcaggacctccgaatcatcattgaagaggccaagaaacttatccttagcaagaacgacgggcagttgttttag

SEQ ID NO: 27342 - DNA, 688 bp, Emericella nidulans
atggccatggttggatctggctctctgctccgacgaaacggcttctacccaccagacaccgtgtggaccggcagcaagaacggaaacgcgatccagttcccttccataggctcgaaccagaacgtccagacgcactcggagaagcccaagatgtcaacgccctcttcctcctcaggatcggcctccaactccggcacctcgacgcctgtaccgttcgacgagaagaccctcacttcagtgaggacacgcgccgcgggcgaacaccgcagagacacgactcgccccttcggccgcgccttctaccaaggcttcgccaacttcttcgtcatccccatccctggaatcgtcttgtactcgacttttatggtggtcatcagcactgtctggcgtctcatgggcgtgctgtccggcctcctcgtcctcgcgcatgccttgagacaggaataccgcgcctttgaccgcgaatggtggcagcctttttccgtctatggcctcttcacggccgttgtcgcggcagtcactttcgcgcagaccatcatcggtgtcgccgttgtcatcaccacgaaatgggctgtcatgggccgccgcacagagggccagtatcactgggacaaatgcagttataaccagcgctggcagttctacctgaccgtggaaacgctcatcaaagacatgtaccgcggcatcg

SEQ ID NO: 27343 - DNA, 309 bp, Emericella nidulans
atggtcctccgcccgttggccatcattctcgccctggtccgatccgcggaaggggaactcgtggtcggatgccgtatatggatgatcgcgaatccttccgccgccggagtaggtcacgcgacccaagatgggaccgggatcgagaccgcgaccgcgaccgcgacagagaccgaccgcttgaccgtgatcgtgaccgagagcgcatcatcgtggatcgagatagagaccgagatattcgggacatcgatagacgcgatagggaccgtgatttggatcgccgagatagattcgatcgccgtgacgaattag

SEQ ID NO: 27344 - DNA, 246 bp, Emericella nidulans
atggcgctgatcgccaccctcgcctgcctggtgctgggctacccgtttgcctggtttctggcgaagttgccacacaaggtgcgtccgctgctgctgtttctgctgattgttccgttctggaccaactcattaattcgtatctacgggctgaaaattttcctcagcaccaaaggctatctcaacgagtttttgctctggctgggcgttatcgacacaccaatccgtatcatgttcacgcccagtgcg

SEQ ID NO: 27345 - DNA, 342 bp, Emericella nidulans
atgccgacagcacaactgcatcatatagtccagggcctcgctggcgttcctaagacctttatagaacaatcgccccaagatatcatccttattgatgtccttgttgctggccccagcaaacttgggcataaactcgggcgtttccagaaaaccatattctgtcacactcagctctgtgactgtcggggcggacgtatcgcctcgaggtgccaggcaggctacatgatagccattctctctcgtgctgcgaaaaaaatcttgggctcccacggttatgaggttttcgagactgcgatgactgctcacatacaggtagcaaccggtgaacatactacatcttga

SEQ ID NO: 27346 - DNA, 807 bp, Emericella nidulans
atggggtcgccgctgaaaagaaagcgtctgtatctttggtcaggagccgacgacgaatacgagacgagcgatatcgatttgcaagaagcacgtacccagaacgacttgcgtctgaagtccatctttgaggggattttcgaaaagtacggtcgggattttacagacgtcggcgacgagatcgaccttcagacagggaagatcacggtaaacaacgggcacatcgatgcactcgaggtggaaggcaacggttatggggactggctgtcggatgcaaggccgcaggctccgagacatgtactagcagaaaggacggattatgagggcaagccggcgcgccttgcccttgacgccgatgcgtggggtgcagaagatactgccctggaaggcgaccacgacctgcaacatcccggccggaggacggtccatctactatcacacatgcggccaggctctaggaggggattgggcgaaactacggaaacagattcagatcagggtgcggcgggtgacggagaggatcgtgctacgtcggaggctgaagacgacaggtcgagtgtggattctttgttaggtaccgcactatcaatcccggcccagaaagtcggtaagaccaccaagggcgagactggcaccgaaaaagcaattcctccccacgacggatcccaccaataccaggccgcacatactgagagactcgatgagactgtggaccccatttggcgcgttcctgagatcagtgcgaagtttacaacaccgactttgccgagtcgacctagacctaacccaaagcctgtcattaacaatgca

SEQ ID NO: 27347 - DNA, 650 bp, Emericella nidulans
atggtcctcgtcgcatactctgattctgaagcctccgactctgagcaagaaaacaccaccccggccgcccgaacgtcagctaccaaggccactccaaccttctcaaacacaccctcagcctccgccccaaaagtcacacccatcgtcgacaagtcaaacccccgcaaaattcgagtcgccctgccagagatcagacccgaaagtgaggaaggggaagaagatggccccgcgcgtaagaagctcagaatcggaggaggcggcgccggcgcgttcgcgggcttcaattcattactacctgcgcccaaacgacctaatgcgaaggtggaaacagataaattagccggcagcagacccacgcgtaaggtgtttagcttgaagaccggggctgcgccgggttttgatcgcgaggccgatgaggagatgaggagagatatggcgtttgagaatttgggaatgggcggtgatgacggtaatcaggatgagacaatccccaaggcggcgagtttgaggggaaatgaggacattgaggcgaggaatgccgtggaggagaaaccccaggaagtggtcctgaaggggaacccaatgatgttcaaaccgctgtccgtggcgcgagcagggcagaagaaaaagaagccgattattccgacgcc

SEQ ID NO: 27348 - DNA, 468 bp, Emericella nidulans
atgacgacggtcagccgctcgctggaaagatcgtcgggtcggtatgatttttatctcctcccaccgacccgcaacaagtgccgacccggctaacctcctacacctcaggattcaaacagaaccagttattctgtcacctgcgctgactccgtcacaacaacctgcaatgtcgacagcggcgtgacaatcatccaggcccccagcactgtgacagtcctcgtcactgaaacaggacagtaaggcacccgtccactcaccaacacctctttgaatcccagccaaccaatgctaatatccatttcttgcttcagcaccggcagcgttctctgcacacacaacgccaaaacgggaacgtgctcgctcggtatggacggcgagttctttgccacgagcaccgaacctgttctttcgtatgaagtcaccatcaccgaaacagagaccggttcgccgtcgacttcgaaatctccg

SEQ ID NO: 27349 - DNA, 1033 bp, Emericella nidulans
atgcccgcctggtgccagttttttgtagcagactggcaacgcgtctgcgggccgtcatggacgatccgtgtcctcgacaccgtccctggctcgcccaaccatgcactccaatatattcctccagaactccttcccgaaacgtttgtgaacagtacaatggacggtccgtatactggaccccatagcgccgatttcctgcgcggcgcctgtcttcttctccacggcggggtgttcatggatgtaggcattattctgacccgatcgctggaccggatctgctgggctcagctagaggacccttgcacgcctttcaatgtctctgtaccctggatgtatggaacaacaatggcgaaccatttcgttgcgagccgcaagggcgaccctttcatccgacggtggcatgagctcttcctgtatgtgtggaaagaccgcactaacttccagggactcacgaagcacccgttattttgcgtttgccgcacatctggacttctctgcgtcggcaaagaggggtttcaagtgggagtttattgttgatccggctacggtgttcgactacatttcgcaggttttggcttggattcgactgacaatgttggaagacgcgggagacgggttcagctgtgctgattatgctgtcaacaatatcctctggttcgatgtcctgcctgagaactgggggtttgaggagaaagtcggttttcgtggagagaatctgtttaggatcatggccacacggacagatggcgatccggagagcgaagagtacaagaaggcgcacgaggttgtctggcacttcttgtcccagtgcagcatgcaaaagatcacgcacggggagaatttgacgaagacgcccgcgctaggttcattgtgggatagggaggagaatcagggcaaggatatcgagccagggacttttgctgagctgctcagatacggaacaacacattttaagcagacgagaagtacaattcgctatgtgactgtggagaagccgaaggagacgatgcggaagggcgtctttgagccctaa

SEQ ID NO: 27350 - DNA, 1073 bp, Emericella nidulans
atgtcgggtcaaccgatgcctccagcgcctccctactggggagccaactatacacagcaatgggccactcaaccagccccttcatcaggatctattcctcatgatattcaattcaatccggatccgtcgtttgatccacagcaatatcgcaatattcataatttctatgcgaatgcgaacctctcgggattaggaggcgcaagcgcaactggtactttcccgccgcctccgttcgctttccccagcactttccctcctgcaccgagcgcccctccattcgcaaacatgccgaacgtggggtatcctttgatgccattatcgtcagtacattcacaaatgcgtcccaaccaggcgtcaacgaacaacatggacaattcggcaagaaagacaccgggtcagcaccccacgccgactacaaaatcaaatcaggatttggaccgagaagaaggcgaattaacggatatagaaggtgctgcatcggctgagcagcagcctcactcgcaaaaaaaagcgcgtcgtctacgcggcgatatttcaggcagtaagccaactcgcagagccggtagtgaaggggacaacaggctgccgattgggcagtctcagtccacaagattgaacgggcttcacgctcaagatgagcgtcccgccatcatctctaccggttgcgagttgctttcagaccttgaagaaggcgaggcttcgcatgaacctcgcgcctctagtagagctagcggatcccgtaattccacccctgctggcaagcagctgacttcagttactaacatctcttagcctataaccccccaatgccgataaacgccatatctccgccgatgtcaaaatcatcaccagatcttctggaaacgggtactagagaggttggcgctgtagagcaaagatcagtctccgcttctagcagctcaaaaagttctcctgagtcggctgtctcggtcgctcaacttcgggtgcaagcacagggcgccctactcagtttggcaccgcacagtatccgttatactgagcttgtgggtgaaggcatccccccaacaatacaaaaccccctttatgaagag

SEQ ID NO: 27351 - DNA, 396 bp, Emericella nidulans
atgtctggactgacgcttggctgccttatgggccggcattttgggccaggcgtttccggcgtcattcttggagttctgtttgcttgcggtgagctcacactaaacgggatcaggaaggtcagaggagcagccgaaggaacggggtcagagcacttacattgtctcagacttgcagaaagcacaaaagctggaatcagatgaaaatatcagtgaagacgatgataaatggatggaagagacgctcgagacgaagcaggtcaagaatcgagaatcgagaactcgagatgttgttcgttgcacgaggaaggaacgaccgactgcgggaagcttggaccacccgatcccgcctagccctgatctctactgtactggtactgtagagctactcgagagcag

SEQ ID NO: 27352 - DNA, 672 bp, Emericella nidulans
atggccaatgctcaagcaaaccagagacgcaggctgtccatcacgaccctgggcctgtccggctctccaactcagactttgccgtatgggaaccgaaactttcggcagggtagcatctcaagctccgtgggatctagccccgggaaccccgaagaagccatcgcagaagatgaaaactcgcctcctggcaccatgccgaggtctccatttgttcgccgactttctttcggtgcccaggcgctgcgagatgcccgcgctggaagcatcggcaacggtagataccatctctccccccctgtatcacctgccactggaaagcgccggacagcgtcgtctgccggtctctccagccctacaaccaacacaggtgctccagtatcattatctgcaagtacatataacggtcttccccagaacgatatatctaacaaatcttggcgaccaataggcgagggcttcaactggtctgaagctcttcgagcaagggccgaacgcggccctttatctccaaattcagcccaggcccagcaggccccgcagacccagcaccgccggtctgcatccgttgcgtccctggatctgcccgcacgggaaatgcccaagcaacctaaacaagtcaataaacccgactttttccaggagaagatcctcagaggcgactttatggactga

SEQ ID NO: 27353 - DNA, 348 bp, Emericella nidulans
atgcaaagcgccgatgtcgtgttcttggccttcccttcttctcttgcctctaccatcttatctaacgaacatgaccttgccagtgaccttgccaataaacttgttgtcagcctgctaagagatgtgagtacgacggagattgatattctgattgatccgcaatggcctgatagcaaaacatctggaggttgcccgccgccgattattgtgagtgctgcgccgtaccctggtgagggcttgaggattgttcggagaagcagcctacaatttatcccaaaagacgcgagtaataccttgcattggcttttcgcgatggttgggacacttgatgacaagaagaagacttag

SEQ ID NO: 27354 - DNA, 731 bp, Emericella nidulans
atgaagtcgtttctccttcctgctctcgcatctctcgcttgcgcggggagcacgatcacttccatgttcctgcctgggtttagtaaggaaagcatcgttgcctcagtcgctggaaatgtaggtttaattcaatcattgcgtgacggattacttcgacctgcagagctgatttggtttttaggacgataccgcaaccacctacagcatgacctgtgcggcttcttatgacaacgaggaggaatgtggtatgggcaatggtctcaccgtggtcaaggccggtaaggccatgacgtatatgatggatgaaggtgacgcgtagtacgctttccaattgcattgtcaccacagcttggacattatacctgacacccgccagttccttcagcggggagtgcaccgtcgacggtacgacggctgcctgtacaggcagtgcaaccgggtcgggtgatggtcttcctgcgtcgcaaacttacaagacctacgcccaatatgtgcctgtgactataactgcaggctcaatcactgatgccacggctgcgcttactgcaacgtcgatggccgagggaacgggtactgctgcgcaggcctcacccactgcgagcgaagccgccgaagagacggctgatggatctggagcagaagcgactcccacaggtgcggccgctcaaataactggcgctgggtcgattttattcggcggagccgtcgtgttgatggctgcggctctctga

SEQ ID NO: 27355 - DNA, 1182 bp, Emericella nidulans
caacctaaacgaacactggacgatcgcgagcttgactcggctgacgatgaggatcgctatgaccgggtcggtgatcgcatggactatgaggatggggtagaaggagactttcaggaaacagtgaatatcatggacttgagcttggcccgggctccagagcccaaatcctccaacggtgaggtgtacacgatgccggttccgaactttctttcattagaaacagaggagttcaacccagagacatacgttgcgccgccatactctactgcagcgacatctctctgctggcgctatgacccgaatgatgagaatgttgtccaatccaacgcacgtataatacgctgggaggatggatctttaacgcttcaacttgcatcggcacccaaagaacaatataaaaaagacacgaaacctcttgttcctcttgacaagtcgggagactacgacacgaagttggattctcatgtatatttaggagcagcgtccgagacatcaggagtgttcagactgacttctcacctaactcatggactcactgtatatcccacgactatggaaacagatgacgcggttcagcgactgcaggaatccctagctgcagctgcccgcggcggcaagaagacggcggatggatcagcacccgtcatagaagtgaaggaagacccggagcttgccaagcggcaggcagagctcgcggaacgcgagaagttaaaagcggcacgtcgccgtgagcagcttgcagatagggagttggaccgtggccgcagatacggcatgtctcacccgaccgggggtgccggacttacagtgggggggctggaagatgatgacggcctcctcgcgacaaggcctcgtgcaaagaagtcacgccgccctaaccgtagaggcgagattttcactgatgatgaggaagactatgaccgccgtggccggacacgggaagatgaatatgatgaagacgacggcttcctcgtcggcagcgacgaagagcctgagatcgtggatgatgacggtgaagaagacgttttggaagatgatgacctggacgcagaaggagaagatgatcttccccctccaaggcccagggaaaagcgagcttcccctgacgcaagacctgcggtagggtctcccccggctaggaaaaagaaccgctatgttgtggatgatgatgacgaggagtaa

SEQ ID NO: 27356 - DNA, 593 bp, Emericella nidulans
atggcctctcaagttggtgaaaccgtcgccgtccccattgcggatgagcagttgaaggacggtaagtgaaccaatgcgattcgggatctttaggggtcattgctaataagagttgggaaccagggaccacaagcagcgtcactcccgccacttctgcggacgaagccgttgagcaggtggctgaaaaggcgaaggagctggccaaagacattggggccgtccccgccgaggataagaatgacgctcctgtgcagaatggcacacataccgacgaggacaaggaacgtggtgctgagcagaatcccggtgtcgacgagaagcccgagccagcattggagctgctgtccaggccggatggcccggaagccgagccggctgtcgctgtctccgagaagcccgaatcgaacggcgtcacacccgagcaggctccggtcgctgaaccgacatcgacccaggtcaagtctgacacacccgctgtcgaggaaaagtcgaagcctgtcccggaaccgttggatcgaccagatgtcgcggctgacgagaaatcatccgtggccgagccggcgacaactgaagtcgcgcctcaagcaccggtt

SEQ ID NO: 27357 - DNA, 422 bp, Emericella nidulans
atgaaaccagtcatcgtcctcagcacattcacatccattctcgccttgggcatttcgcttccccccaagagtgaggatcaggcccatgctgacaaccgtatgctgactctgccctaccttgttctgctctgcaataaccgactaatctgggattgtagatgacctctccgagagacaagtctattactgcgacaaatacagcgccgggctctgcgcttgcttctgccgctacaacaagtatgattactacaagtgcgctccgaattactgccagtgctacaacgtgtacgcaccggactgctattacgcgtactactactactcgtctggtggctatccttcgccagcggagtatgaagtccacccgcctaagtacccgcactgtcccgcgtatccatactgtagcgagcggccgtacacga

SEQ ID NO: 27358 - DNA, 447 bp, Emericella nidulans
atgaagctcacgtacttccttctccccgccctggcgctctccgccgctatccaagagagaacgccctcggagtcggacctgactcttcacacacacgacgcccgagccgccacgctctgcggctctggatacacgttggataaggccgttcccctgcctaaaggcgtggacccggacaagcgcaaggcaacgctctttgcttacagcaacaatggaaaaggctgcgtcttcctcgacaacaacgtcggaaagaagcagtacatgtccatcaaggtatgcaaagtcgggggtaaaaactgcgacagcgacactggctcctttagccaatacgcggggcctgtctatgtgtcaagctttgcttgtgcgccggttaccgcgaagatgggctcttcgtcgagcaatttgtatgtgaactataagaatgactatgttttcccttgtaattaa

SEQ ID NO: 27359 - DNA, 408 bp, Emericella nidulans
atggtgctcgaagagcttcgtaaagaggcgcaaaagtgcatacagcaaaaacagcaactggcgactggatatcaccattcagatcaagtcaccgacagcgccagtgcggatatgagcgctcaggagccaaacgtttcaaggcagagcttcagctatgagcctgcagtgtttcctcagtctacattcgcgcatacagagcaagctatcacccacagcccacccctggagctttcgaacatgcatccggagcagcaaacctggatagaaaacctgattcaagacagcagccctagaacctacattcccagttttaccggctggggagaatttgactcgctggctctcacaggcctgggagagttaggtcacatattctcatccaatgatctaccggatttccggggttaa

SEQ ID NO: 27360 - DNA, 285 bp, Emericella nidulans
atggtcgcgtgggctgttctcctgctggctgtagtggctgcgacgctgctccacctactctataactattcccgcctaaagtccgtttcggggcccatcctcgctgcattcacagatgcctggagggcaaatgcacagcggtcatcatcatcttctgaatacggccgacttctgaaagagttacatcgcaagtatggggttgctgtgcgtctggggccggggttcgtgagtttaagcgaagtgggggatattacaagagtttatcatactctgctccaggacgag

SEQ ID NO: 27361 - DNA, 438 bp, Emericella nidulans
atggctcccattaggcctaaagcttccacgaaaggccgcaaacgctggggtcgtgggaagagcaaccacttcgagagccgcaccaagaggaatcgcaaaatcccgcgccttggtatcaaccggatcgagagaaaccgtacagagaggagcagtgccgagagacagcgtgctgagaggaataaggttgagaagagtcacgccgtgaatagtattgctgaaaaataccgcgctgagaaacagctgccctggagaccgccgcggcctctagccattcttgcccaaaaacacgaactggcattgtctagaaaagccctgttcccgcagtcaggcccttctgctgcgagcaagaagcccaagccagtcatcactaaatccagacatggtctggctaaatacaagcctgtggcccagtggccgtcaccggaacctttggagatg

SEQ ID NO: 27362 - DNA, 405 bp, Emericella nidulans
atggccaatgaagtttctcgacagaaaatctaccggattggagaggtggttgcagatggtgacagtgaccaggtcgtggtgaatacgctagctgacctatttgatattaagaaagccctgtccaaagatacttcggcgcaattagtcggctcaatgactgacgcgtctcttcaaaacctgaccgacaaacgttacagcagccgcttcggcgcagttgactcgaaatccactgaggttgtcactcgaaactctccttccacacttgcgacgcagaatgacaaccctccggttggtattatcgacgggggtctctctcaacgaattggagcaaggcggagtaaaccatctcccaatgaaatgagaaaacgcggtgcccctggtacggcgaagagcgatgatgagtaa

SEQ ID NO: 27363 - DNA, 302 bp, Emericella nidulans
agattcaaatgtgactcggacctccattgagctggctctgaagtatgacaagtctcattgtttccttgaaaacagcatcaagatagtataggccaccaaggtccctcgaggagggcagtttagttcgattacggaaccggggaatactctcgatctcctgtcggagtctgcgcataatcaaaggattgttcagaaggaagaagaacacagagacaaaagccttcgttataatctgaatgctcgcagcgaggatgaggccgtcgggtgcactaatggcaagtttgcgggtagcgctggggccg

SEQ ID NO: 27364 - DNA, 443 bp, Emericella nidulans
atgatttcgagtccgtttcaagcaagttcgtctctttttgcttctgacggtgctgctgctggtgattccactggaaacggcgatttcctcgatgagcagcaactagggaactacttgtcgtttcttaacgaatcttcttcgaagaataacgacgaatctctggatccgtttgggttctcggctgataacggcgatgcccatttgcataagaggagtttctcagccagtgatgcttgttttgggtcagaggagcccggatttggtggcgggggttacaacaggttccttcacggtggtttaggtgatgattttgattctcctggtggttttggctcgccggattatgtttctagacagcaagaggagattgtgaggatgaagatggctcagagacagcgaatggctgctgctcagtacttggcggctactggttctccaatgtc

SEQ ID NO: 27365 - DNA, 326 bp, Emericella nidulans
atgcctacgtcaaaggttcaagataaaaacggacaaacgctcaaggagggagactatgtcttcacaaggatccgcggcgttcgcaccaagggaaggtaggcgtcaccacgacctagtccagcctcagtctgagctccctaaatacctggataatgtttccgtgtttgtggactagcctggtgtaattcatctgataagcccatcccactccgcggggcccaatatattgtagggaaatgcagagactgatgtcagcaatacagatagagaaaatcgtcaccgatgaggctgaggctgagcaagaaaacgtgaagaatcctcccaag

SEQ ID NO: 27366 - DNA, 363 bp, Emericella nidulans
atgggagtgattattgatctaagcgccagcaggaacacgagcgacaaacccgtccaagagatcaaaatcacgcgagtcccaccggaaaattggcgcgcggtcaagaaattgcgctctattgatccggaacaaagtattctcttgacctcgtcgaaagggagtagcagccttgtgttgcgtcaagcacgaggaaatagccaatccaccaccaatcttcagacttcggaacagggtgcagaagcgttgaagaaggaccgccagtaccccccatatcgatttgcaatcaatttgaaaaattggtggatggtcttgaatggttacggaaacccttttaccgaaaagaaaatgtcttggcgcccttaa

SEQ ID NO: 27367 - DNA, 383 bp, Emericella nidulans
atgccttccaagacccaaaagtcgcttgaggctctcgtggcctatttcaaacagtcgaagagccgccgcgctacgattgtgcgtgggcaaggcgagcctggtcaccgagctgccccagcgcgtgggggaaacaatgatgcaagattcggaagccgtattgatatcggagaaattactgacaaagcaggtaaggaatatcgacggtacaaattccagttcaatttgaacgcggagattccactctcaagaaaaaggccgctcaagattcccacgagggttattcgaccgcagatgtggagattcaagacgataggacagagggggaagaagagcaggcgatgcgagagtttgaggaggaaatgtcaaagaacttgagagagtag

SEQ ID NO: 27368 - DNA, 390 bp, Emericella nidulans
atgcgttggattacaggtaacgagtcggaagcagcccagtcctccatgtccagctcaacgcctacaccgtctcccacaccctcgtccacgcccatgccgtcggaagaatcatcctcatctacgaattctggcgccattgccggtggtgtcgtcggtggtgtcgcgggccttgctctgattctcgcactggcctggtatctcatacgacggcggcagaaggctgcccaaagttcgcttttggcatctacaagtgactctgcccctggccacgatacaaaagagcacgccggattcttccaggcagagctggacaacaatgcataccgcgcggagctgtatgggaaccacgatggattgctgcacgagttgcccgtggagggaggacgatag

SEQ ID NO: 27369 - DNA, 369 bp, Emericella nidulans
atgaccatagcccttcttgactcaccgcaccttcccttgctcatcgcaaagagctctgagagactcactgctgcatacaatctacttacccgtggtttcgagagactgcatatcaagtttatccccgcaaactacggcctatgcgtgttcttcagattggtggacaattgctccagtgcgaaggaagaaacagccgctgtgcacgaacttgcacagttgggcttggttgtctcccaggggcagaactatgcgcttggagacggcgtctggggatgggcgaggatcatctttgcgtatccgccagacgtcatccagcgggcgttggatgttctcgagaagtttagacggggccgtgggggctgcatttga

SEQ ID NO: 27370 - DNA, 300 bp, Emericella nidulans
atgggcaagggtaaatgggatggtggggggcaatgtcgaggacggccccagaagcggtggcggattcctattggggtgaggttgcgagaagaattggtcgtggagatcgcatgggcagagtgggtggggagtccgataaatggggattcgatcgttagggctgtaaacgtgccgagaaagcccgcccttgtaggcggtcacggtgttgttgagggcgatcatggactctgtgacgatgttgtgggcatcgatgacgacggagccgtcgagtctgacaagctcatggggaggtgcggctga

SEQ ID NO: 27371 - DNA, 741 bp, Emericella nidulans
atggaagaaacaaacgtcaagctcagcgtacctctaagcgaggacgtgatcaagctctcggctctagatcaacagataatgcgattctatgcaaaggccgtctttatctttgagcgcgattcctcaaaaacctcgattgacattgttcaccacctgaagcaaggcctcgccgtgaccttgagcgagatacctgacctcgccgcgaccattgctccagtcccgaattctcaccgcaaggacctggagctacgcatcgggcccaattcgggcgtccctttcaaggtcgtggatcaaacaaagcaggaatcttgggtatatggcacctaccctgatctggctgcgaaacacttccccaccagtgatattcctcacgatatcctcttcatcccacagccgcaaccaagcgcggacggactgcctgctgcgtttctgcaggtcaatattattgatggcggagttatcatcgcgatctcatggcaccattcagtatgtgatgcgagaggcatcagtatcctgatcgatgcctgggccaggcatacagcgacgtcgctagcaaacggcaaacccgatctgcctgcgacaccagcagagggcagccgtgatcggtggcgattagatcacggcctgcgagaggttactattgaccaacttcccgaatacacgattgatagctctgcccgcgaagacccaagcggttcctacctgctcgaccgcgaaaaccccgtcacagtaccttattct

SEQ ID NO: 27372 - DNA, 486 bp, Emericella nidulans
atgcacactagcaaacctacaataagggaggtttatgagaggaagaggcttgccgcaaaggagaagcgtgtcgcgaaagagaaacatgctgccgagagtgtgaatgtcgatcccgatacagccagggattgggaagttactcttgaggttgttttgcctgccgcgtcggagcctgctgaggtgggtgataccggcttatctctgacagatccgccggttgaagtagctagtcaagcgatcgtcgcgattccgaccggcgacaaggcctcgggaaaacgtccacaggttgacgactccaaggagaagaaaaggaagaagaagaagaagaagaagaaggcagcgaaaagggaggacaagcctcctatttttgaggataaggctgcttcggcgaatctcctcagaaagtgcgcgagtagcctacttccggcttcagatactctactggagtctagaaagtacgctgagacggcgtcacattttctaagg

SEQ ID NO: 27373 - DNA, 219 bp, Emericella nidulans
atgacagagatgagagatggagaggcctcgaatcccgtggacgcaacgctgacgggcttgcgcgtgatgaactgccccgaccgcacaggtcattcagattcagaggtacattaccatcaccagggcgtgcacccaaacgccactgaacgccccggctacagcggcgatggtcctgctggtaaagcgaaacgaacatatgcaaactcccccggactatag

SEQ ID NO: 27374 - DNA, 436 bp, Emericella nidulans
ctgtctcggtccggttgacagcgctactgccactcctgtccctgccactagcactgtcccggcctctgtgcctgttatcacgacctcgacggccacggcaactccttcgcggatccccgtctttgttccctctagctccagctccagcgcggtggttaccttcaagacccagatcaagagttccagccctggtcccagctccagtttcgctgcggctgcaactactgaagctccaacctccactagagcctccccgtacactccatacaccggcaacggcggcacaacatgcacggtaactgactatgctggcatctcctcggccgttgcatcctgctcgaacatcatgctctcggacgtgtacgccccgccctccagcaccattgaccttcaggatctgcagaccggggcggcggtgatctttgcggggaagacg

SEQ ID NO: 27375 - DNA, 444 bp, Emericella nidulans
atgtcacggggtttgaagaagttctctgagccccttgataaggtcccgactctgggggggagtctgcgcaaggagctttgctatgaaagtgcgttttgcgaggatatcgtcgagctgagcattttgagacgctgtgaactggacaatctctcgctgcacagcgtcaagaatatggagcaaaccctgagtatcggaaacgacgatagaaaagaggtgcaaaaatggcaggtgtgcacgggacagctgatcggtagctgggatctggcttgcagccctaaaacttcgccgtaggcaggtcaaggtagaaaataaggtctcgtagatttccttcagctgggcgccatgaaagtcggtgatgctggtcgtagcgaagtccggagtgaagcgcgggaccaggctatcgtacagactcacgacttcgaccgccgcgttagggggaggaat

SEQ ID NO: 27376 - DNA, 212 bp, Emericella nidulans
ggatctggacaccgtctgctctggcgctgctggaagagaacgtcaagaagggcattctaggtccaaagtccgtggtcgtcaagagcagaggcaagacgattcgaccgcagaacgagaactggctgttcaatatgaacacgcctgccgaatacaagcaggcccagacgctgagcgaagagatcacaacaatcacagaggatctcagttcataa

SEQ ID NO: 27377 - DNA, 264 bp, Emericella nidulans
atgatccgcaagcgatacctggaggccactctaggggcgcgcagcagcgatgaggaagaggaggttacggcgaaggatgagtccatggagctgtccgacctaacgcgtaagtcgctcgaagatgacacgcgggcttggtcgaagcataatacggttgctgaggagcggttctggatgcggcagaagggttggcgggagtctgcccaggtggcagcttcaattattgaaagccaggcgaaaccggatatgaagaagcagcaatag

SEQ ID NO: 27378 - DNA, 267 bp, Emericella nidulans
atgtctcgcctcaaggaatccaagcaagctggacgcagattactgctcaactacattgatgccgtggctgctgtgaaccctaccaaagtagtcttcacccagatcatctcctttgatccaccagttcaatacgacctcacgtatcaggagctggcgagcatcgtcaaccgtcaggcctggtggctggctgagtgtcttcatgggaaagccagagacgtcaccatcgcgtacagtcccttaatctctattggtcatctcctgcactaa

SEQ ID NO: 27379 - DNA, 413 bp, Emericella nidulans
atgacgacccgcaaacacaacgaattcttggacatcggaaccagcgacgacgaagacaacgatgccggatatgactccgaagccgctgaagagagtaaaggtcggactgtgaagcgaagaaagacacaatctcgagaagatggcatagaaagcgcctccgaggacgagagctcaggcggatcagagggagaagaaagcgatacagaagcgggaggtgtacgcctacgtgaaaagaagcgcggacagcgtgatgaatatgagaatgactcagacgatgatggcaattacatgaaccaagaatcccagtaccttgacgtgaccgccgaagtggaaaaagcgaaggccaagaagaaccagaagccgctcgacaagctaaaaaataagccgccgaagaagaacaaaacgggcgtcgt

SEQ ID NO: 27380 - DNA, 225 bp, Emericella nidulans
catcccctgaaagcaacgacctcgctgagtctgtcagcgaaaacgcccggcattgtttggaagctgccatgaagatcactagcatcttgcgtgatctgtgcgaaaatggtaaaatgtaccacagcttttgggtatgtttgtaaagctatcgtggatggattgcgctggaccctaatttttgctacagtttactcattactacgcattctcagctattgtggtctt

SEQ ID NO: 27381 - DNA, 322 bp, Emericella nidulans
ggctgctggggctgctgtcaacccataacagcctctgaaaaacgtgagggagaaaatgacggggatatgtgtttagctgtctgccaggaaaagaaacctgagtgtcctgctggagaggcacccactggtagcgaggtacttggattatacccttaacccgtcctctcgcatactgtatacgatagacgattctaacgaggtattacagggctgctggggctgctgccagcccaatgccatcgctgagaaggttgccgaaggcgacagtgacgtttgcatggccgtttgccaggagaagaagcctgagtgtcctgcaggagag

SEQ ID NO: 27382 - DNA, 222 bp, Emericella nidulans
atggtggccgagcggagccggcaggctgtgcaggccatcctgctcctggccatcgccctacggagctgtgaccagatcgcctgggcttgggacattctcggcttgggcgtatcaatggcacagtcaatcggcatcaaccagacccactcagaacccgattcgactggtggtgtctggacgtgtttgagaagatcctcggctttcagagcggacgggccttaa

SEQ ID NO: 27383 - DNA, 342 bp, Emericella nidulans
atgggatacgcaggatattccgtaccccagcgcctggccgcctacgaggagatgtggcgcagagaagaaagtgagctttggcactggctggaagacagggtaggtttagatgggattgcagttccaacagtgaaccgccagtccgagacccgcgcacctagtcgccggtctcagggtgagcgggagctgaaagcctcgctaagcgaagagacgctatcagaccgggagatggatcacgccattcgcagcacgcgggagagactggatacgttggagcggatattgcataaacgaaggtcgcaatccactaaggacaccgagtcttcccgcggggaactctag

SEQ ID NO: 27384 - DNA, 306 bp, Emericella nidulans
atggactcagacttcaacggggatccggatcttcgagcgatcttggaggaggattcggtatcaatccggcttttgcagcgggatcttcgggcgcggcgcaacaaggtctttgaacagatgtacggtcgcagataccgccctgtggcgtgtacgccgttcgagtcaggtggacgacatgcgtggtggtgtgattgccagcaaaagacgttcaaggacatgctgaccggacgggtttttggtgaaaagggtgccgctggtgtaccaaaggtcagggacgacttgtggtatgacagcgcggaggagtga

SEQ ID NO: 27385 - DNA, 207 bp, Emericella nidulans
acttcctgcaattcaaaacagctcacaatctacctgcaaccagctgcagagcagcaatgcaacattgaaggaaacctgacagcggtcaagacgagcgtcattgtatcccgaaacgcagtcagcatcacggcgattgcagaagtctggagtcgcgtgatggcgattacatcgggcattatccgccttctacctgtgaactacatgtag

SEQ ID NO: 27386 - DNA, 255 bp, Emericella nidulans
atggcggcaaacctaggcgtggcggatcggtatcctgagggcaagcccgttctgaatggagatgggagtcaggagaaagcagtgccggttgttgaaggccggattgtgcttgtgggcgatgcgacggcgacatgggccaaggggggattcgacgctgagactgtgcatgctgttaccctggccagtctggacggcgagtttgcagatgttatggcaacggagcaggtcattgcgtccttggaagcgttgaattag

SEQ ID NO: 27387 - DNA, 348 bp, Emericella nidulans
atctcgttgaccgcaaaatcgatactcttagctactacaatgacctgtataagacagcagaagacgacgctagcagctatattctggctggtctccgacgggttattggcttgagaaagacgcatcgagacgccgtgattcacgacggcgtgattgtggtatgtcaggcagattcggacttcacattcaggaaccggcaccggctgagcatagacggtcatctttgaggacgccaggtcgaacattcggtctgccggtgctgcggccccgggtgcctatggagctggcaaagaaagatcgaacgagacaatgttacttgtgagggggttaattccagtggtattatga

SEQ ID NO: 27388 - DNA, 422 bp, Emericella nidulans
aagcgaatgaggacacccaggccgctagtgaggaaccggcaaaagtgatcaacagcgagacagtacaagagtcttctgaccgtcgaacgagccaaggtcctggttcagagcctgaagcaccggtagagaaggacggcaatacgtcgaacacggaaatacctaaggtggaagacaagcccaatggggtggctcaagagttgaccgttaaaccatcatcgagccctgaatcggcttctgaacctatcccggctatggttaccgctgatggggctgcgtctgctctaccggacggacaactagagggtcagggaagcgcaggggacccaatgcaaattgaccagaaacccaatactgagggcgaaccagctgctacgaccgcggattcacagccggcggattcgcagcccgcggctcctcccgcc

SEQ ID NO: 27389 - DNA, 858 bp, Emericella nidulans
gcccgtctttatggtgtcccagagaaccacgtcgtcatcgtccgcgagctggctgaaatccaatcgcagctcgacgctgaaaaggagcagtcccagaaatggaacgaattcatcaccgccccacgcatgctgtaccgtattcttctgggtattgttctccaagctctgcagcagctcactggcgccaactacttcttctactatggtaccaccatcttccagggtgccggtatctccaactctttcatcactcaggtcattctcggagctatcaattttggaaccacctttggtggtctctacgttgttgagaactttggtcgccgcaagtccctcattgctggtgcttccttgatgttcatctgcttcatgatcttcgcctccatcggacactttatgctcgacgttgagcaccctgagaacacccccggacccggcaagggcatggttgtcgtcgcctctttcttcgttctcttctacgctacgacctggggtcccatcgtctggtccatcgttgctgagctcttcccctccaaataccgtgccaagggtatggctctcgccactgcttccaactggctttggaacttcctcattggtttcttcactcccttcatcaccggagccatcgatttcgcgtacggctacgtcttcgcgggctgtctcctcgtcgctgtcttcgtggtctacttcttcgttattgagggtaaagaccgaactctcgaggagctcgactggatgtacgtcaaccacgtcaaaccctgggagagcagcaagtacgagatcccgcggatcacctaccacgatgacgctcgcggagccaggaaggagaatactgagcacgctgaagttgcttag

SEQ ID NO: 27390 - DNA, 764 bp, Emericella nidulans
atgcccctcacgtggtcatccccagattatccccttgaaccatacaatggaccccccaggaacatcgcctacatcgaacaactggatttcggcaaggaggtccagccaaagccatataatattgcaggaacacatccagactcaagagtcctgattaccgacatcaagatccttgatgctactgggcgggagccgtaccacggagatgtgctgattacaggttcgctccctttaaactttgggattatgagggaagattgatgtgattaggggagcgattcacacacgttggcaccgtccccaacaaagaagatctcctcagagacccccgagtgcgtgttttctatggcaacggccgcaccctgatccctggtcttggagacgcccatacccatctcagctggaatggaggcgatctcggccgattaggcgagttgggcgttgaagagcacactcttctcacggcgcggagtgcgcggtgttttctggattcggggtatacgatgtaagccttcttcttcttcttcttcttcttcttcgctttttgttttatggtgcagtgaggtagactgactgtttatcaggtgcttcggcgctgcatccgcgaaaaggagactagatgtagtcgttcgcgatgccatcaacgcgggagatatccccggccctcggtatcttgcgaacgggcaggagatggcgaggagagacggccacctggtgccggggataacggcgtacgccgatgggccggaggagatgcgagaggt

SEQ ID NO: 27391 - DNA, 282 bp, Emericella nidulans
atggactgggaagccacccatgctcaaattgcagccctacaaaaggaagttgcggccctctgtatgaaagggaccaggaccccaagaaaagctagtcaggcgcctgcagaggagaagcaaaagaggttgtccaagggcaaatgcctacactacggcgatcctgaccactttgtacaagagtgccctataaaacctaccagacgccctaggcaggtggccacagtccaggaagaacaagaccaaatcgatgactacagcaagagcgagtcagaaaatgaataa

SEQ ID NO: 27392 - DNA, 886 bp, Emericella nidulans
atgccgcgattcatcctgtacctgcgcctgtcgtttgcgtttgtgacggccgtctgggccgcgcagagcttgatcattgcgctgcaatgcatcccactcgaggcgctgtgggataattctattactgacaagaaatgcatgggttccgccatggtgtttatatctacgggcgctctgacgatcgtatgtgactcgttgatcttgctgcttccggtgcagattgtcatggggttgcaggcgaagacggcgaggaaattggcactactgggaatcttgtgttttggggttttgtaagtcttcctttccctaaaccttagtcgaaagtgaacaaccagactgcgtgatcgctaaccaccaagtccagtgccgtcgtgtacgtggcatttccttccatgcccgatataaaccgccagtttaaacattctaacaccgtactagaacctccatcctccgcatggtatccatgatcgtctccgtccaacacgaagacgacgcaacctggtacttctcacccgtggtcgcctggacatgcgccgagatcagcgccgcgatcatcgccctctccctgcccgcactacgagccatattcggtttcttgaaggaacaccactcgacgcgcggcaaaagcaattcgtacccaaatacgggttcggggtcaaagggaatcgggctagactcgctttctaagtcggcaaccaagcagccaaaagtgttccatgggagcggagtctatgataacacggttgatattggggttgggaggagtccaagtcaggaggttctctggaacggatacggggaccgaagttatgggaataggggtaatgggagtccgagggagattatgatcacagagacagtggatgtggaagttggaagggggtag

SEQ ID NO: 27393 - DNA, 835 bp, Emericella nidulans
atggatggctcccgcgtagctgcgcagctgggtttgcaaggacgagcgttactagagaattactaccggacaggcgagacggactatctcgatgcatcgatagctcacgcccgacaggcgctagagctgtcactacctcacgagcgattcatctacctgaacgaccttggaaaccgacttcgagagcggttcgaggcgtgccgcaatgtcgaggatatctccgaggcaattaatctcgtcacgctgtcgcagcagaccgttagcgagcgttcactacatgttatagtgctcaataacttggctacctttctaagcgatcgatttgagtggaatcaggatatcaacgatctggaacgcggcatcacggctgcacgccaggcactcgatctctgcagtccaggtaaccaggcagagtgtaaaaatagtctctgtctgctttatgggtatcgctataccaggctgggtgatttggatgacctggagactgcaatgcagatggcacatgaggcagtagagacggctgaggacaaggcgcacctcgtgatgttcctgggaaacctgggcatttgctacgagcgacggttcgagagactaggggacccagctgatatcgatagagctgtttattatgcacaaagaacggtagatttgactagtcctaggggcccaacaaccgatggagacgatgatgaagaagaggaggaagaagaagaagaggaagaagaggaagaagatgaagaagatgaagaagaggaagaagatgaagaagaacaacaacaagaagaagaaaaagaggaagaggaggaggaggaggaggaggaggaggaggaggagg

SEQ ID NO: 27394 - DNA, 391 bp, Emericella nidulans
atggcggaccctctgagcatcgcagcttctatgctggctgttattacagcggccgttgagtcagtcaaatcgctccacagcaccgtcaagcgcttcaaggatcgtgataagacactacgcagacttcgaactgagcttgaggacctcacaaacatcctcggttcactgggagatgtaataaatgcagaaatgccaatgttggctctgcttcaaggtcctgttgagcgatgcaaccaactatgtcgtgaatttgaactggccatggagaatttcggtcgaaagtcaacgacaggctttcgtgattgggcaaagatggagttcatgagaggcgacatcaacgaattaaatgataacattgcgggatacaagtcaactatcaatgttggattgg

SEQ ID NO: 27395 - DNA, 776 bp, Emericella nidulans
atgaagtcctttacccttcctatggccgtcctggccactctcagcgtcgcccgcgctgagatctccgtcagcgagtgtgccgtacgtcttcagtttttgattttgttcggtgattgctgctaacttttgtagaacatgtgtcttagcaacatgcttgccatgtctcaagagctcggctgcgatgatggtgatttggaatgtctctgcggaactcccgactaccgatacggcattcgtgactgcactaccgaggcctgccccggtgataatgccaatgatgtccttcaggccgttcttgacgagtgcccaggtttgtcgatcctctagaatggggcgagagcatgacctaatgtatcccaggccagtcaggcagtgaccttaccctgactcccgatcctacttctacccagaccgcgtctggcactgccactggcactggtactgaaagcgccacttcctctgccggcgctggcgataacggttcgtcgactatctatggtgacgatgcctcgactatcgtcggcggcggttcctcgaccgtcgttggcggcggtacctcgaccattgttggcggcggcacctccactatcctcggagacgacactactagcgtgattggcgacgactctacgacggtggttgctaacggcgccacaaccgttatcggcgctgtcaccactactggtgccaatggtgagacgactaccactgagactacttcgaccggcggaagctctaccggtccttctagcaccggatctccttctcctactcag

SEQ ID NO: 27396 - DNA, 878 bp, Emericella nidulans
atgacggacctgccgagcagcgacatgttcatcgcgacgggctgcgagctgagcatgcgctcgcctagagcaccgccgagagaggatgcggacgtctggcatgtttatgcccgccattcaagacaaggcgacaaagcgatcatgacggacctgtttgtatttgatgcggtaagcggccagctcgtggagatcatgctgggcgtgcagtatatgcgtgtcgcaaaggcgtcgatgagcatgatgctcgcacggatgaccaaggacgactcggtcctgagaacgaaagcgctggtgccaggaccaacaccagcggcagccttccaggctgctctaaagactgctcctgaggtaagagctagctctgaacctggggcgaaggtaaaggccagcaagacctcgaagaaagagaagaaagagaagaagcccgttacgaaggccaaatccaagtccagcaagccctctggttggcgagatattaccgaggaagtgcgcaaccttgtggctacagtctctggcattgatgccagcgagctcgagctggacgccgagatggcggactttggcatcgatagtctgatgggcatggaactgggcaaggaggtcgaggccgcgttcaagtgcactctcgaccagaacgagcagatggaagcaaccagtttacgcaagttcgtgcagtgcgtctcgaatgcgctctttggtccaaacgcaggtcctgcggaggcagaagatgacgaagacgaagagaagagcgacaactcgtccagcgagtctgcctctgagagcgacgacgccggctccgaaagctcagacacgggcatcctcacgcccactggcgaagaggagcagcctttgcctctcaaggcagtggccattcacaa

SEQ ID NO: 27397 - DNA, 510 bp, Emericella nidulans
atggccactaaagaggaccacctcccctacgtccacatgattcaacgagatatcctccgagtcgttgattgcgtagcgccagcggatggctctggtgccgccaatgtaaagcacgtgcgccgagttcttaacggtctccaagccaaagaagtgctctccgccgaaacggtagcagaaattcacgcaggcttgaaggatcgagaaacacacccagcacatcttgatctagaagctgaagaggaagaagaacctggttcaaagtcgaagacagggacacctcgcggtatgaaggcgaatggcatccgggtagacaagaggcagattgagcagcgaattgaggaggatcgtgagcgcaataaaaggttacgagaaagtatgtggactgttcgaggggatgatagcgacgagcacaggaagttctgggacgaaaccagcgacatcggcgaagatgactttacgactgcacatgaagagctgatggagcggaatgagatgatcaacgctgtttaa

SEQ ID NO: 27398 - DNA, 459 bp, Emericella nidulans
acccctggaaatcggcgttcgagtggctgcccgacgaccagaaagtctggtacatgtgtcttacggacttcgaccccggctgcgacgagcatagatggacaaccacgacggacgtgtaacgctggccggcgacctgcgcacgcgatgacgtatcagcggggacaggactcaaccattccgtgacagatgcgggaaactagcaaccgccattggagagtttgtttctgggacaagaagagaggtgacgcaattgacgagtatgagcaggagatgatcgagcgtgctggaggcgaggtgcgcatgtcaacgacgaacacggagatgatgcataactgggaggaggtgctggagtcgccgattttcaggcgtgggatgaccaaggtgcaagatacagcggcggctgaagctgcagctacggcttctagtgataaagatgcgcatgatggaaagggaggttga

SEQ ID NO: 27399 - DNA, 297 bp, Emericella nidulans
cggtcacgccgccatggttgcgcctagggacacggcttttgccgaagaaagtgctgaagtggaggtgctgtacgccaaccttgagaagctcaagcgcctcacaaagaagatccaagggtcgctcgtacgcctcgaaacgggcggaaatgtcgtcaagcatgcaatcggacctatatatagcaacacacaatcgcttcagataacgaataataacatcgaccgggttattgaagccatcgaacgcctccggcagccactggatgcgaagaatcgagaagaaggggtcattcgggctgg

SEQ ID NO: 27400 - DNA, 283 bp, Emericella nidulans
atgcggagcctcgtggcccaactcctcgagtcacatcctgggttcgacctccagacagtgcggaggatagcgcagctccgtggaggcgatgtccatggtctatgcgagatcttccatgagctcgtcgctcaacttccggccgatgttgtggtattctgtgtcgtggacggggtgaccgtgttcgaagagcggatggggctaagagaaagtggggaggaagtagtcaaggcgctggtgcggactgttcaagaatgcacccagaagaagcccgttggggaaaaga

SEQ ID NO: 27401 - DNA, 324 bp, Emericella nidulans
atgcacacccacgggacgcccagccaaggcggatacgacgcggcgggaccgaaccaagacaacaccaagacggcacccaaagaacccgccggcgcgccggacccagcgcacgagcgccaacgagaccaggcgacacacccaggagcaaaccgagcggaacgaacgggacggggcctggccgcacagggctccccgcagactgcggaggagaaggcagccgcgacactaacgatctgcatgcgccaacccccgtgcacacgggcacggcacctccaaaagacagaacccgcaaaccaccggccacacaacagaggaacgggctga

SEQ ID NO: 27402 - DNA, 333 bp, Emericella nidulans
tttgtgcctccgctccaagtctcatggggatccttctacaccagcttcgtcggtcacacaaacaccggtgtctgctatcacagctcgtcggtcagacatcaacggcatggacctgttcatccagcgccagctctgcatgcaatgtccttagagcacgggctcatcgatccagctatcttccagataagcctccacatctagccagtccagtacatactccactcaaggatcccgcgagtcagtcgttaagcggcgatggcatcaccttcggcagccaggcacgctaagtcagtgtaggctctgctgacatgcagttcgatgtggagaatgagt

SEQ ID NO: 27403 - DNA, 417 bp, Emericella nidulans
atgacctttctgaagcgagcacacgccgaagcaatgcacatcggccattcccatgcatgcctgactatggaggagcaggaacaagccttgggaggccccagaggtgaaaatgccgggtgtctgtgtatgctaccaacagcggaggcgtatacgtttattccagttgttggacgagccgcggcattttacccgtctggtctggagacggcacaaatctcggcaaacgcgtcgtatacaaagcatccgtacttgcttgtttctgtgaacaccacgggatttgccactattcagccgtctgttcagagggggcaatcgtgggctgtgctggagcagatctggattggcgggctggaggatgtgccgaaggtgattggggagttcaccaagccggttttgaactctgtcaatgatttctga

SEQ ID NO: 27404 - DNA, 234 bp, Emericella nidulans
atggcagctttgccctttgcccttgtatgtcttctagctgttctcgttacaacaagcctggctatcctagagaagcagattgttacattccatccccaggcaggagcagttccaattcataatgccgcaatactatatgatactcaagaccctgttgccgtcgaaatcgctacagaaagcctggcaaatgatatcgagaatatacgggaagaagacctcgtcgctctgctgtag

SEQ ID NO: 27405 - DNA, 414 bp, Emericella nidulans
gctgccatggagcaagtgtccgatttgtcggatttactcactagcattacttaccaaaccattactgaggactggcttgatgctgcgcgtgcttcgggaggagacgccatcgatctagatcccgccgatggagcgttcctcggtaggcaccgaaatagtcaaaatggatgcgcgcgatcaactaacgatatctagttctgttgatatccaacacgtggacaaacgccgaccacgacgaccggatcgtcagcttttccgagaatgtcattgccgaaatcgagtcaaaggccagggctgctaacgtctattaccccttcgttaacctcaacgatgccggcccgagccaagccccgttcaagacatatggaaagggccaatcgcttagaaaattgaagaccattcggaagaaatacg

SEQ ID NO: 27406 - DNA, 424 bp, Emericella nidulans
atgcctggtgtaagctcaatgtccatcactattaatatttgttccccctcgccgtctcctgctggtagttacacatacgcctacaccaacttcttcgttaccgatatactactaaatattctaccacgccgtatccacaatgactctcaaagttgtaagtcagcgtttatccgactcaagtcgcgctccgctctaactgaacttcccttcccagacggtttcgactcctccgcggctttcgacgtgatcaacgctaccctccagagcgacgaagccgagcgcaagaacgccatcaagagtgcccagactatcgttgctttcaacctgaagaacgccagcggcaaggaagagagctggtacctcgacctcaaggagaaaggcgaggtcggcaagggtgctgctcctgccggcaagaaggctgatg

SEQ ID NO: 27407 - DNA, 276 bp, Emericella nidulans
atgcaggattgcttccgcgcacaccccgacgtctacggcgctgaacttgacgatgatgaggaggctggcgctgaggccaatgctgcaggagtcgagcaacccctcgctgccgaggttgatgcctctgttcctgttgagaagcatgagcaggccaaggaagtacgcgacgaggtaaaatccgctgcaggcgaggttgcggaaagcgaggaagttgttcccaaggctttggacgtgtcggaacaggagaaaacgcccgagcagcaaacggagaaatag

SEQ ID NO: 27408 - DNA, 220 bp, Emericella nidulans
atgctggcacatcacatgacctagccgccgaaaagtcagctctcgccgccccagaaactcggtctcaacctctcaatctgtctgaccagatcagggctgttgtggtcaccatgcatcgccaatccgtcgtgcggctgtctcgccagctcggagcatttccgctggtcgaattgcctcccccgtaccttgcgccgtctctccatttccccctgaaccggtc

SEQ ID NO: 27409 - DNA, 688 bp, Emericella nidulans
tcgtcaaaccggattcttcgtcggaaactctccgaaagagagcgcaaccaaaagcctggccaccgtaaagtctggtcttctacgactcgaatgcggaattcatggagctgctgtatatgagcaagagcgccttgcaaaggcgaaggcggacgtatccgcgccggtagtagatcagcaacctgtctcctaccttcttggtgatactgccgcaatcatcaaggacaatgttgaaggcgagaactatccacaaggtaaagtacaagtcgaacgctcgccaccagctgaagcgagctcgaagacaaccccagagcgtcaacccttcgctcaatccgccagtccgaagcctgagattggccatgatgtcgaccctgtaaatgttgatacgcaagagtcagtattgtgcatttcccagatccctgatgcacagctcaaatcgcagaagctggaggcttataatcagccttccaaacatgtggttgtcgaagtaccagacagccaagatcggactcaagccaacggtccaacagctgccgcgctatcaaccgaaaccccttcttcaaagccacatcctcggcgcgaacactccagcgccgtttacgttgatgacagcgacgacgtagaggacgctccccagcaaggaggcgtacaagttgaagagacaccgcccggattgccgagtatcaaataa

SEQ ID NO: 27410 - DNA, 411 bp, Emericella nidulans
atgagacgagcgtcccggcaatccttcctgccgcttctcgcgcgacggcgcctttccttcctgctcatcctgcttttcttgctctttctcctccatgcgctgccgccggtgttttcccagcgcaggaaccggcgcgttgtcggtggaaagtggctacccgactatgatgtcaacgaactcccgcgatacctgcaccgctcaccgtaccgagagaagccagatattgagtttgagcagagggtgagagaggcgttgaaggggattgaggaggatgcactggcagctgcaggaattggagacgatcgtctggccgaacagcgcatctggcagattcgtttgggcggcggcaatgacgaacacgtggaggactcgttggcgttcaccaagaggaacagcgagtgggagtacact

SEQ ID NO: 27411 - DNA, 432 bp, Emericella nidulans
atggttcttgcgcaacgcctactgggagtgctgctggttgacatcggtctgcttcagttggtcgttgtcgtctctagaaacagggctggtgtttaccttactcagtatacgccccgggttcggcgcaagcttaatcggaatagtacagagatgtgtatcaacctgcgtggatactccagacttagcatgggcgttgtagaactgactatcagattacgtggatcatggcgtctctccatgtgggcaggacaacacagagacgttgacggccatagcttgagcccgctaactgacgttgccgttaatcaacgtgctatattccaaaatggcttgcgaaagcagcggtcaatgcgctattgttcacttgtattactgctcgaggggcaggccgtccgtgttatcttggccgaaagggagaggacaactgcgtag

SEQ ID NO: 27412 - DNA, 704 bp, Emericella nidulans
atggttcgtgtgtcctggctcttgctcggcctgctggcatgttgggcgacggccgagtccaacaaaactgagatcaatttaattttcccgcgcgaaggcacgttcgccccaatgcactcgatgccagtggtgttcgccatccagaacccatctgtcgccaaggaactccatgcaaccatccagtatggggtgcgcccaaagggcggtggttctaacgagacggtgtggagctattcagacgagctggccaacgtcccagccaacgcgacaacctacttcagttccaccagccttggcaatatgctgaacaccaccggtagctgggagttcttctggaacttgtattggctcaactgttctcagtcaaatgatccggcgtactatgactccaaatacccgtgggtccttggagccgacggcctcaatcaggatgccgttctagatggcttccacttgtcaagctacttggtcaccgccaaatatctcttcttcgacaccaaagaaggtggcactgcggtaaacctgaccaccctcaccagtgacaaccaatgcagtgaagcctcggggtttgttgtcccggccttggtaaacacgctcgacattcccagggactttcctgatcacaatagcctgccgtccacgtgcgctcagctcgccaattcgacctcgacttcagccacgaaagcgagcccttgcagggttag

SEQ ID NO: 27413 - DNA, 291 bp, Emericella nidulans
atggctccggggggattcactgctcctaacttgccctcacgcagggattacgtcaacttattcgctactgtcatcgaatttcgaaggcagctgcaaagaagactgctgggagggggccccataaggtatgaccttatgtgtgtttataacgtccaggacagcactgtcgaacaaaagatcatttgccacgccttgtcaagcattgagtatattgctggtctcacgggcgctcttcgtgagacggtggttggcagctatgttgctggcctgaaacacgcctacagtaagtga

SEQ ID NO: 27414 - DNA, 1095 bp, Emericella nidulans
cctagagacagtccaagggacgctggagttttcgcatcccaagagcgattccattttcgcggctgatgaggtctcattggaaattaatcttccggctctcaagacagcgaagacactggatgtcgggggatatgcggcaaggttcgttttgcacagccctagcacaagagccttaaggagtacgagcttgtttaatccatgatttcacaataaagcttttcagcgccggagctcgaggccctgggtgacccagccaccgaatactccgaaagtctcgttgtttccgtccaaaatcgtatcgagcttgaattcccaaagctacataccctcgttggtgggacaacgacgatccttaataatattacccggtacgtgaataagttttcaatcctcgttgaagtttaggtccccttcttcaaattaagaaggcagagaagatatactattactgtatcctgaactaagcgtttctctacaggataagttttccggccctcgccgaaaccaacgaaatattcgagtttaacacgggcaacccggtagagatatactcgacaattgagacagccgctcagtttcggttgtggggtaaaataaagaggttcgtcaacgccattcagcccacctataagcatcccggaccaggataaacgtcgctaactcatgtatcctctatgtagcattgaactgccgaatatggttgatctgggtatagtcagctttgcctatgaaatacgcccctgcaacgagacactcgttaagctctgggaggcggttcctaaccacggcccaccaggacacgagacctactgggattggaggtgttggcgggaggatctcccagagactactcacaatacaccatttgctaataacactaatgatgacgatgaacccgccggtgtggatcaagaccttaccgaaacaactacacttcctgagtctgagtcggggttgggatcggggtcgggcgaggaaacaacaaatgttccagacgctgaagagtctcctggggatatcgggttgtccctgattccgcctaggctgtgtgggcttgcaatcctgcttgtgactctggttgttgttcttgcttag

SEQ ID NO: 27415 - DNA, 207 bp, Emericella nidulans
atggcatctgacagcttcctatccctgaaggtctctgatctggagatcctgtcgtacgagaatgctgagacttggtttaccaagatgcaagcagtccttgatgggaaggagatctggtacccagttcaagacatctacctgatccgccagggcttagacccattacctgatgttgatgaagatgatgaattcttcctacctccatga

SEQ ID NO: 27416 - DNA, 501 bp, Emericella nidulans
atgtcctatgcggttgaaacgaagaagcgcaaattccaccgagtgctcgaatcccttaccaaaccttcaagtcccggatccagccaatcctcgagcgttgcggcagctcagcataccccgtctgcgaaaagggcccgtctaagcgtgaaagatgatagcatccttacatctgtgcggaaagatgtcctgaagcttgcacgatctgcgtcccgcgcttcgtctgtatcaccacagtcccgacccagctttgttccttgggaccgcgagcgtttcttagagcggttagagacgtttcggcgggtagatcgctggtcgccgaagccatcggcggtcaatgaggtggaatgggctaaacgtggctggatatgtacagatgtatcccgtgttacgtgtgtaggaggctgtggtggctccgttgtcgtcaaaatccccgatgaactggacgagctagatggttacgacgccgataagatccaggaaaggaatgaagtccgtgagtga

SEQ ID NO: 27417 - DNA, 528 bp, Emericella nidulans
atgcttgcctctctagttgctgctgtgcttgcgactacctcctgtgcatccgctgccttgacctggtctttggacaagtccgccaatccatctgacgacgaatccgatgcctacagccggattgaagcagcaatggaggcggccgtcgcccgttacgcccgccttggtgatgccagcaagtcgatatatgtctactacgtccccggcgtcccgaccgccgaagcaagctacgatggcactattcgattcggtagtgatcgcgcctatatgaacgaacgcacggcactgcatgagatttcgcacactctgggcgttggacagacagctgcctttgatcagcaatgcgcggacggtgactggcctactgcccttcctctccttcgatcgtgggacggcgcagatgccgtcatcaactgcggtgggggtcacttttggccgtatggactgaactataatgacgaatggagcgagaccaacggcgatcgaaatgtattgttggtcaatgcaatggttgatgatggtatttaa

SEQ ID NO: 27418 - DNA, 1033 bp, Emericella nidulans
gaggactgattgaagcgtcggacgcaaaaactggtttcatcggtgcgatctcggttgcattctacgctgtctcgttcagtcaccatacgcggccatacgggttgatcatttcgacttccgttgctggtggcacggccgtgtctctggggatcgactgttatagcaaggctggtctgaaggagttctggctttatctctggggtaagtgtcttctcgaaatggtagggctcacgctgaccaagcagcgttgaacgacggcatttttcctttgggaacggaaacgttcccggttactcggcacatcaaagtcgagctcgctgtaacggtgatagtagctattatgggcgtgatctcgcaattacgactgtggaaggtcgtacgggaaagaagagcacacgtaaacgagaaacagcaggaagaacagatgcaacgtgacgaagctgaagctgaggtcgggaaacgcttggaggaggataatatgaaagagcgcatggagtgggaggccaagtacggcgaccgcgcgcccggggcgtctgagagctcggcaagtattcctgagccaacggtttgttatacggacgagggagaaggcaaggacaagaagaaagataagacagcagaggaaaagagtatatccgactctgtggtatcgtaccgctgctccgattgcagggcacgtggagaagacagcaccacagatactaacactgccggaagtgaacccagcggacaggagatagggtcggcagacagagacatccgcactctgagccaaaatgcggaaggggacgatggctaccccaaagctctgcgtggagcaatggaagacgacaagagctccggcattacggccattgcgggctccgagactgtgtctgtttactcgaaacgattctctatgctttcgcgcaaaagctctgttaaaagcgctgcgaagtctgtgaaaagtcccgagatgcgcgtttcagagtctcaagaagctctgatcggacataatgacgatgtcgattctacgattgctgttgtggacgat

SEQ ID NO: 27419 - DNA, 210 bp, Emericella nidulans
atgagtcagcctcgactaccgtacggtcaagaggaggagcctccggcatacaactacggcgggtaccgagactcgtacgaagacaatgaccttcgctatgctgggtcgacaatgcggctcctgccagcaagctctcatgttgattcagatctgagcactgatttgggcacgtatcggcagggagatcccttcggcgatgagaaccagtaa

SEQ ID NO: 27420 - DNA, 288 bp, Emericella nidulans
atgtcttccctctcaaacaccaacaccgcaactctcctctggccccttttcgtcttgggaaatgccggtctagagaacgaggagcaccgccgctttgtcctggatatgctgctcgggatccagagagctaggaatttgggtagcgtgcgtcggacgatcgaggctgtgaagcatgcatttggtacaaaggggctagggttagttgtgcatggtgccaacaagatcgtggcgcaggggactcagactgagtggggtaacgcaaggttccggtttatcagtctggcataa

SEQ ID NO: 27421 - DNA, 372 bp, Emericella nidulans
atgtcggttgccaaattcagcgcccagttcagtgccgacggagtgctcttcctcagtgtctgccctggtatggtgaatacgggactttgtgagcagtgtacgtttgtctgtcttgctcaccatctggcgttgcttcccaagggtctgggatcaaagtgctaacttctctttttctttccaatagtgaccgaagaacagttcgccggggcggcggcaatgctgaagaagtttcaggagtactcgcctacctttaacggaccgagacagcctgctgattcggtgaaggacgtgcttgatgttatccataatgcaactgttgagaagaatgcgggcgggttcttatcccacaagggcgaccgcaaatggctttga

SEQ ID NO: 27422 - DNA, 240 bp, Emericella nidulans
atgaagaggtgcgtttttgatcttgacagccaggccgagagcaccggccgttacgactatagcgaagagctgtacgaccaaccactacagatgattatgccgtctcagggatctcagaagttcaagcgtcggcatatgcgtgcttggactgaaaccttaggtcagagcgagacgaaacatcagggcggctcatcgtccttgaagtcttacgtcttgccggcgggccattggattccctaa

SEQ ID NO: 27423 - DNA, 212 bp, Emericella nidulans
atgctgttccgcaagttgaaacgcatcgtacagctggggttttccagcatgtcaactactggccatggccggtttatggtgaagaatggccaaatatcgatgatggtattactgggtctcgctgaacgtcgacctgagaactacctagacctcattgattcagtagtgataggcactctccttttccagaacctcgcagggagctccttagg

SEQ ID NO: 27424 - DNA, 264 bp, Emericella nidulans
atgcgtcttatcctcactggtgccacaggcgttgtcggctccgcagccctcaaccacatcctcagcctccctgcgggcgagatttcagcgctgtacatcatcagccgcagtccagtgccggccgcagaaaacaaacccaatgtcactgtcatccagcacacgaactataacgagtacccgcaggagctgttggacaagctgaagggggcggatgggtgtatctgggcgcagggaatatcgcagacgttggttacgaaggagtga

SEQ ID NO: 27425 - DNA, 288 bp, Emericella nidulans
atgactcgcgccgaggcgccgcctatcttcctccagctacaaaatgcggattccttgtcatcacaagctgctgctctgagagccctgaagaatgagacaattggccatgatcaaaggaaagaggcctgggtacgattggggctcattcccatactttccaacgtgcttgcgtctcgggcactcgacaagagcgagctcaatatcggctccaagcagccagagatgcctggctctagagaagaatcggatgatgtttgcttacaggcaagaattcgtgatggagcttag

SEQ ID NO: 27426 - DNA, 435 bp, Emericella nidulans
atgtctattccttcttacaacgactaccaaatctggatcggtgtagttgatgatcacccctccctagaacttgaagagtacatcgtcgccctacacaagagcaacggcctagtctgccactggttctcgacgatccgaacattagacgggacaatcaagcatttcagtgaatcattcagccctggtggagcagaacatctcgcctgcgagcaactgcgcaaaagaatgcttgtttctcacctttctgactggcagcttcgtaagtttgtggaaatatttgaggaaacccaggctcgtgagagccaattttttatcttccgttggctgtatgattgtgtcgactctggcatcctcaaggaggaggatgtggatagggtcaagccctggcttgattttgcggcggagagttctcatgctgttgacgctaacaaataa

SEQ ID NO: 27427 - DNA, 363 bp, Emericella nidulans
atggctttgggtgatgcctttgcattatggctggcgttcaggtacatcttgactcgggctggacagccttgcagtaaaggatatattggcattgaaggcattaagaaggcgctggagttatataagaggacgaggaaaccgcatacgcatcatctgttggaaattgtgcatgcacagctcaataccaagcttgttgcaagggggtctgaggatgaggaggatgaagagtggattaatcgtatgaagggagggcctgatacggagtggctgtcagagcatgatgtcgaaaaggcgttcgcacacgttgttaggcaagaagatgagagagtacaggccctgacagtgtcaaggagtaagctttaa

SEQ ID NO: 27428 - DNA, 562 bp, Emericella nidulans
cctggtccccaacatcaaagacatcgacctcgacgcgctagaaagcgtcatccctttacaagatgccgatttcaccatcaaggagatcgatgacttcacgagcgtgttcggcagccaaatcgacaacaattttcaagcattgctctctcgaatagtcagctggacaattaagagaaccgacgaagcaaaagtcaccctgacagcgcgcaagggtcgggtctataccctgcgcaaaccaagctcatggttccggagcctatgcgaagagcctcaggtacggacctggttgcaggagcagatcgaggatggaaatcatgatggcgtttattttgttgtcggtctgcacacccttttcgatgccgctatttctggtgggctggcgctggcgtcggattttgggggtggcattgcagtgtctgcacctgcaatggcagcaggccccgtccaaataacgcccactccgatcccgggcaacttgcactgtcggcaggacttgaacggtctcgcaatacatcccacagttgcacagccccgggagaacagatattcgcactccggctga

SEQ ID NO: 27429 - DNA, 977 bp, Emericella nidulans
atgcctatgaaatggactcctgagaaagatcagcttgttagttcagagccctttgagagtctagcttttgcatcaaactaaccagtcttctcacattgcagctcttattgaagatcctcgagactcatgacttcagactggatcctaaaaaggttgctgaagtctggcgtaagtttcgtcgcccgttttctatttcctagtccgagttcaggcctaactaccaaacccaacatacagcggccatcgataaccaggataaacctactccccgtgccatcactgagcgtctcgtgcgcatccgtgcgatggttaaaccgggaaagagcaatggcagctccatgatttgccctcgcgctggatccagcagtttgtctcctgtatcgaagagaggacgcaaacctagaaccccgaattcaacccctaggtctggccggcggaagaaggctgcaggtatcatcggaaacggcaagaacgcacctacccagagctcgcaacccaaaagagatatgggtcttgatgatgacgacactattgttcctacggacgcggagcacgaattggataccgattttgttacggggaaggtcgacagcatttccatccaaacgcctaccaggaagaatggagaggggctcctcaactttcctacgttcaagattgcatcgcctcccccagccttaagccctgctgctgctaccgctgggttcataagccccagtgacgttcaagttggagttagcttgggcttggggatcggaaaggaggctcagcggtcacttgatgctgttggtgacggaagtccagtcaagcgcacctccagggcccgccgggctacgaccacattcggcttggtcagctatactgatcatcttgctgaaggtgaggacgggttcgagggatatatggatgaagtggacagttcggcatcggattatgtccctgatagtgccgttttagacgaggaggattttgcatag

SEQ ID NO: 27430 - DNA, 312 bp, Emericella nidulans
atgctccttgcctggattgactggttccgcaaactgttcgacgtcctcaccggcctcttctttcggaggcgccagcccaaccgcaacagcagctccatgaccattaatccaggcgagggagttgaatccgaccgtcgtcgctctgatgattacgatatcgagctggcctcgacatcgacagcggacgcgcaccccgagctcgcgacggccgtcgactactcaaccagggcgaaaaatgccgataaacagtgtaaaacgtgcgcataccatattcccaaagatggccttcaaaagtcggaagatggtaaatag

SEQ ID NO: 27431 - DNA, 1068 bp, Emericella nidulans
cacaccaaaacccacctcgccgcgttcacctgcgctgaaggccagcctcttcagctccaagcccgccctaccccatccccagggccaggcgagctcctcgttgctgtcaaatctgtcgccctaaacccagcagacgtgatcatgcgcaatcaaggcctcttcatccaatcctaccccacagtcaccggcttcgacacagcagggctggtccttgcggtcggcgacgatgtccctcccccgtttcgacaaggcatccgcatagccgcctacgcctcatcggtgtggaaaggatgcagtccagactatggcgcattccaggagcgttgtctcgttccctggcagcatgctactgtccttccaaatgacatatcctggctgcatgcggcaacactgcccgtcgccgtgcaggtaccattgagcgcgtgggatactatgaatattacccaagcgcgaggaacgacggccgttaccgctaccaaaagagaagctcttcttatttggggcgcctcctccagcgtcggcaccatgggcgtgcaaacggcacggctgctgcgggacgattcccatacttccatcgcagccgtatatgctactgccggggctgcgaatatcgaatatgtgtctctgctgggcgcggaccgggtatttgactataaagactcgcaggtcgcgaacgccatcatatcggccgctaggcaggacgggctcgccatctggcattgctttcttgccacgggggatctgcgaatctgtcaggctgtgctgagggcattccttggcggggaaaagacaacgatgattgcgtcagcaccccccatcccctcggacgcggaagtcgtcaaggggattgagactctattcctcgtgccaccaatggaggaagcgcaaaggctggaacagttccggaactggatggcatggctaggggagagccttgctagggcaactattcgacctagtccggagcccaatgttgtgggaaagggcttgggggcgatcaatgctgggttggatagactgcaacagggagtaagctgtacgaagttgattgttgagattgccgagtga

SEQ ID NO: 27432 - DNA, 518 bp, Emericella nidulans
acggggtgatggaggaaacagctgtactcattatcggtgccggtccaagtggacttgccctaggggctctacttgcacgcatgaatatcaaggtaggagagccagactcgccgccatcacagccgcacatgggcttacaatcgggcaatcacaggttctaatcctagagaaagaagtcgaagtgtgtgaggatccacggggaatcgtcgtcaatggcgacgcagtccgcatctcataccagatcggcatcggggagggcctgacgagcaggatcggcaaaggtatgcacgtgtgtacaagcatatacgactctctttctctaacagttctaccgtctgccagacattggtgtccttcattttcaccgtggcaactttcggcagccgactttcatgaatttcgacatcaccgtcgactgggctgagcaagccgtctcgaacaacatcacacagtttcagcccaattacgagcgcgagatccgtaacctgatcgcgcagtcgtactcgcacacctgcgag

SEQ ID NO: 27433 - DNA, 387 bp, Emericella nidulans
atgtcaaggcagccattcagcaatggatgcagacctagtggccttgacctgcgagtcgcgcattctgcaacccccaccgactctgaggtctcgggaaccaacgcatccacacacaaagaccgcatatgcaagttcttacccagttctcagtcaagagaagctcttagcgatgtgacccacaccaacagggtgcttaaagaaaccctagaaggcaatcagaaaccgaccaccaacagcaacaagggttacatatacatcataactgccccgattgcaacagggttcgcgctaatccagcgctgttcaaagggatctgactcactccgcaatcagaagtgctacccaggctcgcaactacactgctgcatccgttgtcccgatgcataa

SEQ ID NO: 27434 - DNA, 318 bp, Emericella nidulans
atgggagtatctgcatctacatttgcacccataccgattccgcctgaatcaaccgaactggaccatcaacacgtcggtactactgctactgtcggcccagagccaggccaaggagcagctttgactgacatggtggatgccttgttggacgagacattgccgttcaatttctgggagacgtgggggcagatgtgggttgtttttgtagatggaacaattcttgagaatggtgcccagaaaacacccagcctatgtgtttccataaccaaggcccttggtccccagactgattcgggctgcttggcacgcgacgcttag

SEQ ID NO: 27435 - DNA, 405 bp, Emericella nidulans
atggagcactcgccctcctccttgtcctcctactcctcttactcccccagttcgtcctactccgccgtgagcgacgactcgggcatgagcatgttggacatgtacttcctgcacggtggccgtggacacggcgccagccccggcacaagcacgggtcccggcagcgtcgtcgatttcccgctcagccagcaatcgttcgatttcgagccttcgtcgctggacagcaatggcccctacttcgagttcaacccgactttcgtatacacacccgaggcgtttcccgtcatggacgccccgacctcctacccggcgagctcgaacccgggctgttcgcccacctccatgcttgtcgagcagtcgatatttccttttgacgggcttagccaagaccagttcagtatgtaa

SEQ ID NO: 27436 - DNA, 306 bp, Emericella nidulans
atgcttgcaaatagcaagatcgcacggcagctgcacagcaaagcattcaaccctgcctacacgtacacagagaaaaccgagcagacgagctacacggagaccggtttcccgatcctggcctttggcgatatcgaggccggcacggtgaaccgtgacttcgtggagtactggtttgaaaatgagcggttgccatcagaggtcggatggactgtgcgtgaggagccggtgacgccggagcagctggcagccgtgacgcagatgatcgcggaggccgtcaagttggtgacgggggagaagaagcagtaa

SEQ ID NO: 27437 - DNA, 708 bp, Emericella nidulans
atggctaaaggcaaaggaaagcagtcgactggggctaactcggttcccgtcaagaatgacacaaccgccaggccatcaaacgacggtgccctttcccagctggaagagagtgcctttgcgggtctccgccaaaagatcgaacagaggctaaaggacggtgctgcgaaacagaagtcgaagaacaataaatcgaagacggctcctactgccgatacgaataatgccaagggtggtgcaacgaagtccgatacgaagtccaaatctccttccgacagcaacgtcaagggcaagaaacgggatcgcaacggtgatgtgattgagaacaaggatagcgagatatctaagtcggataagattgatgacaatgataccttgcgacaagaaatcttggccctcggaggtaccgaggaggattttgatttgcttgcgggtgtcgattcagagtcggaagtcgaggacacaaagccctccaagaaatcgcaaggatccgccgaagacttgagaaaagagctgtcaagcattcttgcggctgcaggccaggttgtcccggatgacctcgcagatgacgaggtagaagaggtggaggacgaagaggaagaggaagagaatgaagatgaagatggagagggagaagcggcggacgaggccgagtctgctgaagagcagtccagcccagatgacgaatctgaagatgagacttctcaacaa

SEQ ID NO: 27438 - DNA, 846 bp, Emericella nidulans
atggtacgtcgcgcttcttttattctatttacctcagaatttatattcagttattttttattctaaccctgctagatattaacccgcctcccctccctcgaacacaactaccagaacaatctccccgcacgcacgccctttctcactgaagccatggcccagaccgggcagagcacaatgtccccgtttgccgaatgcattatcatggccacccttcacggccgatgtatgacgcaccgccgcttctacgcaaacagcaactcgactgcgtccggctccgagttcgagtctggcgccgcgacgcgagacttctgtatccgccagaattggctgtcgaatgcagtggaccggcgagtccagatgctacagcaggtctcctcgcccgctgttgacagcgacccgatgctgctcttcacgcagacgctcggctaccgcgcgaccatgcacctgagcgataccgtccagcaagtctcctggcgggctctcgccagctcgcccgttgaccagcagctactgagcccgggcgcgacgatgtcgctgtcggccgccgcgtaccaccagatggccagccacgcagccggcgagatcgtccgcctggcgaaggccgtcccctcgctgagtccgttcaaggcgcacccgttcctacccgatacgttggcgtgcgccgccacgttcctctcgacgggcagtcccgatcccacgggcggcgagggggtgcagcatctgctacgagtgttaagcgagctgcgcgatacacacagcctggcgcgggattatttgcaggggttgtcggtgcagacgcaggacgaagatcatagacaggatacgaggtggtattgtacatag

SEQ ID NO: 27439 - DNA, 984 bp, Emericella nidulans
acgaaaataaccaagcggtttgttcttcctcgagcagcggttcagggagtggaggcggcacctgggaaacgtacagcaccacctgggttgttactgagaccgatgtcgagacacgcacatctgtatggagtagttgggtcgcggctccgacgagcacgagcgggagttgtcgaagtgatctcggtgagagtgagtgtggcagcgactgctgcagtgcttctgaagtctgtagttccgacaagaagtgtgttctggcagctaccacctcgatctgggcaacagatactggcaccgccacggctcccgtacgaccgacagactcgagcaccgttactgaaactgcgacaaccactcaggccttcgagacgcccgttaccaccgacggatcgccagcgctaggggtcgacgctccggatgacggcggcttgagcggtggtgcgattgcgggcattgtgatcgggacactcgctggtgtgttcttgctgttcctcctctgcctctgcctgtgcgcacgcggacttttgaacagcattcttgcctgtttgggaattgggcgaaggaggcgagaagagacttatgtggaagaacatgggtttgtttaaacgcaccggcctggccgcacgtggcttggcactcggacatctgggccttcacatgagggcgagaatagatcaggatggggcaagcttgcaacgattggaatcgtcctcggtgcgattgcgctttgtctcgggctgaaaaggaagaaggaccacagcgacgagaagagtagcacctcttacacgtacccaagctattatagctattacaccagcacaagtaagttcagtccacggaactgctcaagaaattatcccgctaacagtctttagcgagcgagagctcagaccgacgaacccgacggagcaggcgatcaggacgatcgaggtcccgggtataacgattaacgatgacacgttgaaggtggacgacatgattccatga

SEQ ID NO: 27440 - DNA, 213 bp, Emericella nidulans
atgctttctcgtgaggtactctgcgtcctcaagatccaggcctacggctatggctcggagaatttccttgccaacgcggtcacactcgctgtagaattggaccatgaaatcgcggaagccagggagtatggcgttaggaagccattggttcggctggctggtgtcatcttcgctgccgatgtcgtagacttcctagcattcctcagcaattga

SEQ ID NO: 27441 - DNA, 240 bp, Emericella nidulans
atgacctccccggccgtcacatcaacaccccgggccccgtccgtgattacacccaccttcagccagaaagacatctatacggccctgatggccaaatccctcgatgtcgcggataccacgggcaccggtactgctgcagccacaacaccaacaaggagcaaagcgtcaccttcggcgtttgaatacccaccgccaccgccgccgtctcctgtggagtcacggagccctaatgcattttaa

SEQ ID NO: 27442 - DNA, 309 bp, Emericella nidulans
atgtttagcacaaacaaccccaccgaaccgtcctccaacccgcccaaaacccaagtgaacccctacgcctacgagcctccagcccccagtctcaattcgagtactaaagcagacagaagtgcgactgaatccaaaagcgaacaaagccgacgaattcatagtgcaaaacccggcgacgcgtcggattcttttgactcgacaaactcaaactcctacccgaactcagcgtacgattcgcaagacgctagtgttggcgttgggatagggaccaccacggaacttgagaaaatttctgacaatgggctgtga

SEQ ID NO: 27443 - DNA, 356 bp, Emericella nidulans
atggctgctctgtgggctctacctctttggcaacgggggctggcagtcacggtcatcagagcatatgaccaaggcgtgtcagtaaatacaattaccccaactcactgggaaatgaatacctcggacaattgccaacgaactcgccaggggggatcctcaacctgctgcaggaagtcagccatagcagctcttccgcgtacgccaatgccgcctcgcctcaagtcgtgtcatgcacagctcgcatggcagccctgtgtactctggatgaccacagacacgaagtgacagatatctccctgccggatcccggcatccatatcagagcaaaagtcccaaatcagcgcacaaggtcatag

SEQ ID NO: 27444 - DNA, 408 bp, Emericella nidulans
atggccctgtcgccgtgtggtccctgcgctgcctctccatggtggtcatgcgctccggtcccccctgtggtcgtggtgcctctagccctgctgggctggtctccttcaatcctttttgtcgtggctttgtgtgctttcccagcgggccttggcgccacccgtgtcgttctcggtggttactcgtgcccgcgtttatcgattgtgtccgttggccatcggcttcgcgccctcatgccttctgggggtgcattgctcaccctgtccgtgccagccgctgtgggggtgctgagactgcgggctctggggctcgtgcccttcttcctctccccgtgggtgttggtccgctccccccgctcgtgcgccgggtggcccccccgggtcccctgctagacccttccccccctctcg

SEQ ID NO: 27445 - DNA, 243 bp, Emericella nidulans
agagggtatcgtcgatgttcgtgagagggcaccgcctgtgtggatttgggggttcagtgtaggtggatagtgctgcctgtaacttgaccatgtgttggcgaggctcgccgcaccgcagcgcaggagaaaagggaccctttaggatggttaccgttgcgcagaacctcgatggctgcggaaagaagaggttcgagtcgaagtcgtgtgttatggactcggcgtgggttaagcaatcttccacta

SEQ ID NO: 27446 - DNA, 347 bp, Emericella nidulans
atgattttcgaaccagatctccgtgttccagtccctaataccgatatcctgacctatatcttcgccaaccctccctatgaccctaacaagccggttcgtctgcccccgcaacttggcgatctcagccgttgtgtctagactcttggcatgggcaacactgcgagtatactgggcacgaggccttaaggcgctgactatatgtacaacaggtctatgtcgatgtgtccaaccctgcccgttcaatatcgctcgcgcaagcgcgcacaataatccgccagctcatcgcgggcctgcgggcctggggcgtgaaggagggggattgtgttgctatccattcattcaacgat

SEQ ID NO: 27447 - DNA, 1068 bp, Emericella nidulans
agggtttccgcgtttgctttgctggccgcagcagccactgccgccgctactagcgtccagggtgccgctgaaggtttcgccaagggcgtgactggtggtggaagtgcgactcctgtctaccccacaaccacagatgagcttgtctcttacctgggcgacgacgaggcccgtgttattgtcttgaccaagacctctggctgccagctcgccatcaacaaggacggctggtgtgacaactaccagcctgacgctcctcagactacaatcacctacgataccgccggtatgctgggcattaccgtcaagtccaacaagagtttgatcggtcaaggcactgccggtgtcatcaagggcaagggtatccgcatcgtcaacggcgctaagaacgtcatcgtccagaacatcgccattaccgacatcaatccccagtacgtctggggcggcgatgctatcactctgaacgacgtcgacatggtctggattgaccacgtcacaaccgcccgcatcgcgcgccagcacatcgtgctcggcacgaacgcctgcaaccgcgtgactatctccaacaactacttcaatggcgtgtccgactactccgcgacctgcgacggatatcactattggggcctgtacctggacggcagcaacgacatggtcacgctgcagggtaactacatccaccacttcagtggacgcagcccgaaggttggcggtaacacgctgctccacgccgtcaacaactactggtacgactcgactggccacgccttcgagattgctgctggctcctctgtcctcgctgagggcaatgtcttccagaacatcaacgcccctgttgagagcagcagcttggctggtaacctgttcacctcgcccgattctaacacgaacaaggtctgctcgtcctacctcggacacacctgtcagctcaatgcctttggcagctcaggctccttcaaccaggcagatgagggattccttgttaacttcaagggcaagaacgtggcttctgcggatgcttatagtgctgcgcagagcgtgcccaacaatgccggtcagggcaagctctaa

SEQ ID NO: 27448 - DNA, 648 bp, Emericella nidulans
gtttatccattccagccctggagcagggactcatccagcgtccgctcttcccttagcgaagccagccccagcaacactcacgcctacttcgacctgagcttcagcagctcatacttgcccgtgggcagcctcagcaataacatcccaccaccaccaccgccttcacccaacgatgacctactcgacattactccccagaaatgcagcttctcttcgaactccaccaacaacgcctgcgctttcccgtcgtggccaaaccggccatctctgatcagctgcgactccggggaatcgacagcgtccgcttacctgtccgacgaggatctcttccctgatggcccgatgaccccagaacccgccagcagtatcgacgaggaatccgccgctatggacccgcgtatgggcggcaccagcctcacgaccgagcagcagatccagatgctccgcgttttggccgaagaagaggcccagcgtgctcggttcctcgcgcaggtgcaggcccacgcgaaggcgcagcaggcgatccgggttgcccagctcgcagcgacggagaaggagaccaacaagcgcaccaagaagcgcaagccggtcgttgctgaaaagaagcgacggacgacctcgtcttccaaggtcgtctaccggtcgtaa

SEQ ID NO: 27449 - DNA, 471 bp, Emericella nidulans
cgtattcacgctgacgatatcgatgagcttggtggacccatgggtgtcgtcaacaaaattatggagcgtattggcctcgatttggaccagcctgtttatctctctgtggacattgacgtacttgacccttctactgcgccaggcactgggacacccgagcccggtggctggacaacccgtgagttcatccgcattctgcgggggattgagaagttgaacatagttggcgcggatatcgtcgaagtatctccaagctatgataacaagggtgagacgactgccctcgccgctgcgcaggtggcgtatgagatcatcactagcatggtcaagaacggtgcgggtaaggacttgggtgggtggtatggacgtaaggaaagcgttacccaggagtctgttccagtggttgatgctgaagctgaagttgaagccgaagtgccggagcctgagtccgtgctcaaggacgaactttaa

SEQ ID NO: 27450 - DNA, 339 bp, Emericella nidulans
ttcactcctctcttcgctgccacttctccctggggtgtgtatctcttcttcgctctcatcaacttcatcggtgttcccgtcgcgtacttcttctttgtcgagaccgctggccgtgagctggaggaaattgacatcatctacgccaaggcccacgtcgagaagcgcatgcctttccgcgtcgccaacgacatgcccaagctctctctcgccgagatcaaccagcaggcccgtgagctcggtctcgacaccaactccgattctcatcaccaggttgctgagcttggtctcagcagcgacaacagcagcaatgagaagcaggagcagcatgagaagcagtaa

SEQ ID NO: 27451 - DNA, 765 bp, Emericella nidulans
cctaaggccgtcgaggtcaccaaagcagccccctattctgacgaggccatttcggacgcgcgcaggtctagcgactaccagacgtacctgtactaccttaccacagtaccctggcataactggctggtgtacttcggtctcatggccatcttcgtcttcctgcaggccttcccgacggtctgggtgacctggtgggcgcgagataacgacgctcagccaaacaagaacaggagcatgaggatcggcgtctactggatgttcggcgtgctcggcgcctgtttcctcctcgcgacggcctgcttctacatgctcaagatcgtcgccaaaacggcgtcggttatccactcgcgcctcttacgaacggtcgtcaacgccccgatgtccttcttcgcctcaaccgactcgggaacaaccctcaaccgcttcagccaggacctcgagcttatcgacatggagctcccactcgctgttctccagacctgcctagcgctctttctctgcgtcgcacagctcattattatcgccgtctcggcccgctatatcacggccacgattccactctgcgtcttggtctactgtatcatcggcaccttctacatgcgcacctcgcggcacgtccgcatcatggaaatcgaggccaaatcaccgctcttctcaaacttcatggagctgcttaacgagctcattacgattcgcgctttcaaatgggccgagcaatacaagctccgcaaccgaggctctctcgctgaatcccagctgccataa

SEQ ID NO: 27452 - DNA, 780 bp, Emericella nidulans
ttcatcaagaacggcctgcttctctccctggcgaccagcgtgctggccacgcacggcgcccgctcccactcccaggccgccaccagcaagctctcgaagcgcttcaccttccctatccccaactctgagggcagcgtcaccctcgacgaggtctatgagatcgacggcgagacctttgacggcggcatgaaaacctacggccgtggcgtctcctgcactggtcaagacgaaggcggcgactctgacgccgtcttcatcgtcaagaacggcggtaccctcaagaacgtcatcatcggctcggaccagatcgagggtgtccactgcgagggctcctgcactatcgagaacgtctggtgggaggccgtttgcgaggacgccctctccctcaagactggtgacggccccttcaacgtcgttggtggtggtgctcagggcgccgacgacaaggtcatccagcacaacggtggcggtaccgtcagcatttccgacttcgccgtctacgacttcggcaagctcttccgctcctgcggaaactgtggcgaccagtacgagcgtcacgttgtcattgagggagtcaccgccgttgtcggcaagtgccttgttggcatcaacaacaattacgccgccactgacactattgccagccctacttgcgccacggatgtcaagaccatctgctctgagtcccagggcactagcaacagcgccgaggagaccgaggaggtcagcgatggccctagcgattactgcatatccactgacccgctctatgagtgctag

SEQ ID NO: 27453 - DNA, 1200 bp, Emericella nidulans
aataactcccaggccggtattttggttgctacggagcggtatgcggatgggggggagaagattatggaaggagagttggatcgacagcctattcttgacatgcgtgggaagattagaaccggtagctccgatgttggggctgtagagttggaaggtctcgatgggaacagtgagggaacaaaagacaaaatcacattcctcaacgctgtgccaacgatttacaacagactcctatcaacctttcccactctttcacctcaggttcagtcggcatccaaagtcgccatttcccccgaacatctccggctcaacatctccggctccgcggcgctcccaacacctactaaaaaggcctggcaggatctcagcaacggtaacgtcttgcttgaacgctatgggatgacagaggtcgggatggcgcttagttgcggacttgactttacagaccgcgttgacggcagcgttggctggcctctaccatccgttgaagtccgactcgttgacaccgacacaaacaaggtcatccaacctggcgaggaaattgatggtagtggccgcgctcgcgagggagaaatccagcttcgcggccctaccatcttccgcgagtactggggcaacgagaaagcgacgcaagaaacgtttgccccagacgccgacggtaagggaccctggttcaaaacaggcgatgtcgcaacccgccgctctgtggagaccgctgggctagggaagagcggtgaatgggctaagggcccaatgtatttcattcagggtcgacgcagcgtcgacatcatcaaggtcggcggggaaaaggtcagcgcgctggaggttgagcgggaattgctttcgctgtatgtccatcaagttttgccctcttctctacaagaactaattgaggttaccaggccgcaaatcgctgaagcagccgtcgtcggtctcccttctgagcaatggggccaaaaagtcgtggccattgtcgtccttaattctgaggttgctgcgaggacaggccggaatgggaagtcctggggggtcctcgatatgcggtgggcgttgaaggaccgccttgcagcgtataagttgccgtctgagatgaaggttttggagcgggcgattccaaggaatgcaatggcaaagggtacagttcttctactcacatccttcacttctttagtccccgtgctaacatcggttttgccgtag

SEQ ID NO: 27454 - DNA, 648 bp, Emericella nidulans
aacatgatcggacaccctaagcacgctctcaaagctgttgaagtcggagcggatcttatctgtgcccaagggggtgagggaggaggccacactggcgacatccctaccgttgtcctgatccccgccgtcgcagagcttctccgaggcaagatcagtcccttcacccgtagtcaggtcgcgctggttgcagcgggcgggatgtacaatggccaatcccttgcagcagcactcatgctcggcgctggtgcagtctgggttggaacacggttcattctatctgaggagtccggtgcatcgagagtccaccagaaggcgctgcaggaagctggtttcgacgatatcatccgcacaacgatcttcagtggccgtccgctcaatactcaggccacgccgtatatcaagcgctgggagaacgagcgcaagcaggagatgcaggacttgcagggcagaggtatcattccgttggcgcatgacatggataccaagaaggacgacgatgaggtcctggataatgcgcacccgatgctcatgggtaaggttgcgggactcgtacgcgagaggcttcctgctgcgaagattgttgagagtatggttgaagaggcagcggcattgctggagactggagggaggagtgtttccaagctgtga

SEQ ID NO: 27455 - DNA, 1812 bp, Emericella nidulans
gccgaagacgccgacgctcgtaatctagtggagagcgagatggtcgaagccggacatcgcggtatactggacgagatccgcggcaagacagtctctcgtgacaatgattcgggtcgacccgagaagaggatcaagatggatcttatggacgtcgacctgcccaaggcccctgctgctgccgaggaaaagaagaccgcggacggtggattggtcagagggctccagcccaaacgcttaatcaacctggaaaaccttgtatttcatcagggtaaccatttgatgacaaaccccaacgtcaaattgcctcagggttcaacgaaacggacattcaaggggtacgaggaaattcatgtaccgcagccaaagtctaagcaggagccaggagagaggaaagtcgcaatctccgaactccctgaatgggcgcgtatcggatttggggatgcaaaggagctcaaccggatccagaccaagtgttacccctcagctttccaggatgatggcaacatgcttgtctgcgctcctacgggctcaggaaaaaccaatgtggccatgttgagcatactccgtgaggttggaaagaaccgtaactcccaaaccggagagataatgcttgacgactttaaaatagtctacatctcccccttgaaggctcttgtccaagaacaagttgagaatttcggcaggcgtctcgctccttacggcatcaaggttgcagaattgaccggtgaccgtcaacttacgaagcagcaaatcgccgagactcaggtcattgtcacaacccctgaaaagtttgacgttataacgcgaaaggcgtcagagacgagctataccaagctcgttcgtctaatcatcattgatgagatccatcttcttcacgatgagcgtggacctgtcattgaaagtattgtcagcaggaccatccgacaagtcgaacaaaccggcgatgccgtccgaattgtcttaccgaccatgccctctaaaacaagattcattggtgtcacggacaagaagcccatcaagcaactgaaaattatgaacgacatttgctacaataaggtaattgagcacgtggggcaaaatcggaaccagatgctcatcttcgttcattctcggaaagagacagcaaagaccgctaaatatctccgagacaaggctcttgagatggagacaataggtcagattctgaagagtgactctgcaagcagagctattcttgccgaagaggctgaatccgtcaatgacgccgcccttaaggatatcctgccttacggcttcggtattcaccacgctggtctaagtcttgcggatcgtgactcggtccaggcgctcttcaaagatggcagtatccaggttcttgtttgtacagcgaccctggcgtggggtgtgaacctgcccgcgcatactgttatcatcaaaggaacacaggtctactctcccgagaaaggtagctgggtcgagttgagtcctcaagatgtcctccagatgctgggacgagccggacgacctcagtatgatacgtatggtgaaggtattatcattaccactcaagctgaaatccaatattacctctcactcatgaatcaacaattgcccattgagagccagcttgtgagcaaacttgcagacaacatgaacgcagagattgtgctcggaaacatccgaacacgagacgagggagtcgactggcttggctatacgtatctgtttgtgcgcatgctgcgctctcctggtctatacagcgtcggtgctgactacgaaaacgatgacgctcttgagcagaagcgtgttgatcttgtgcactctgcgcgctag

SEQ ID NO: 27456 - DNA, 642 bp, Emericella nidulans
gtaaaggagctgcaagagatgaacgtcgaactcatggtctccatctggccaaccgtcgaaacagcttcagagaactaccctgagatgcttgagaaaggcctcctgatccgtcacgaccgcggtctccgcatcgccatgcaatgcgacggcgacatcacgcactttgacgccactaatcccgccgcaagatccttcgtctggagtaaggcaaagtcgcactactacgataaaggcatccggatcttctggcttgatgaggcagaacccgaatactccatctacgactttgatatctaccgctaccacgcgggcagcaacatgcagatcggaaacacttatcccaaggagtatgcgcgagccttctatgaaggcatgcaaactgcagggcagacaaacatcgtcaacctgctccgctgcgcctgggcaggaagccagaaatacggcgctctcgtctggagcggcgacatcgcctcgtcgtggtcgtcgttccgcaatcagctctcggcgggcctaaatatgggcattgcaggaattccctggtggacgacagacattgggggcttccatggcggaaacccggacgatcctgccttccgcgagttgtttaccgttggtttcaatgggccacattctgtcccgtaa

SEQ ID NO: 27457 - DNA, 741 bp, Emericella nidulans
gttgacaatgaggctatctacgacatctgccgccgcaaccttggcattgagcgccccagctacgagaaccttaaccgcctgatcgcccaggttgtctcatccatcaccgcttctctgcgtttcgatggctccctcaacgttgatctgaacgaattccagaccaaccttgttccctacccccgtatccacttccctctggtggcctactctcctgtcatctctgccgacaaagcctctcacgaagccaactccgtccaggacatcaccatgtcttgcttcgagcctaacaaccagatggtcaagtgtgacccccgcaacggcaagtacatggccacttgcttgctgtaccgtggtgatgttgtccccaaggagacccacgctgccgtcgctacccttaagaccaagcgcactatccagttcgtcgattggtgccccactggtttcaagattggtatctgctaccagcctccccagcaggtccccaacggagacctcgccaaggtcaaccgtgctgtttgcatgctttccaacaccaccgccatctccgaggcctggtccgctctcgaccacaagttcgacctcatgtactccaagcgtgctttcgttcactggtacgttggcgagggtatggaggaaggtgaattctctgaggcccgtgaggatcttgctgccctggagcgcgactacgaggaagtcgccagcgactccctggaggaggagggtgaggaagttgagtactaa

SEQ ID NO: 27458 - DNA, 534 bp, Emericella nidulans
cttaatgaatctggctggcgcgatgacgaaggcaacccattagctgaagacaaggaccttggtactcgagacgaaatccgcctaggtgagctggtcaaggagaagtacaagaccgattactatgtcctcgacaagttccctgttgatgcacgtcctttctatgcgatgccggatccagatgatccccgtttcaccaactcctttgacatgttcattcgtggccaagagattgtctctggaggccagcgtatccatgatccacatatgctcgaagagaacatgcgtcgggtgggcattaatccggacacgatggaggagtacatggaaggtttccgctggggagcgccgccgcatgcaggtgctggtattggcctggaacggatgctgatgcttatcctcaagttgggtaatatccgtcttgcgtctatgttcatcgcgatccaagagtttcctgccaacctcccgccttcagctggacatcagaatcgtctacatgagcaccatggtgaagagagagagtacgtgccaaagtga

SEQ ID NO: 27459 - DNA, 1170 bp, Emericella nidulans
gcgactgaagtacagaagatcaaggtcaagaaccccgtcgtggagttggacggtgatgagatgacccgcattatctggaaggagatcagggaaaaggctagtttcctcgatattgacctcaagtactacgacctgggtcttgagtaccgtgaccagaccgatgacaaggtcaccaccgagtccgctgaggccatcaagaagtatggtgtcggtgtcaagtgcgccaccatcactcctgatgaggcccgtgttgaggagttcaagctgaagaagatgtggctgtctcctaacggtactatccgtaacatccttgtgctgataccatcaagtggcggtactgtcttccgtgagcccattgtcattcctcgcattcctcgcctcgtccccggatggactaagcccatcatcatcggtcgtcatgctttcggtgaccagtaccgtgctaccgaccgtgtgatccctgggcctggcaagcttgagctcgtctacacccccgagggcggccagctgaggctatcaagtttcaagcttgccttgactaagggccttcctctctacatgagcaccaagaacactattctgaagaagtacgatggccgcttcaaggacatcttccaagagatcttcgagtccgactacaagaaggaatttgatgccaagggcatctggtacgagcaccgtctcattgatgacatggtcgctcaaatgatcaagagcgagggtggtttcatcatggctttgaagaactacgatggtgacgttcagtccgacattgttgcccagggcttcggctccctgggtctgatgacctccacactcatcacccctgacggccaggcctttgagtctgaagctgcccacggcaccgtcacccgtcactaccgcgagcaccagaagggccgcgagacctccaccaaccccattgcctccatcttcgcctggacccgtggtcttatccagcgtggtaagctcgacgaaacccccgacgttgtcaagttcgccgaggagctcgagcgcgcttgtatcgatgttgtcaacgaggagggtatcatgaccaaggaccttgctctgtcctgcggccgcaaggagcgcgacgcgtgggttaccacccgcgagtacatggctgccgtcgagcgccgactcagggcaaacttgaaggcccgtctatag

SEQ ID NO: 27460 - DNA, 510 bp, Emericella nidulans
ctgtactccggtttctccgacacaatccttgttaagctctttggtgtctggaagccccgtgagggttctgcccagctccacgcttcatctggtgtcgcctactacatgtctcctcctctgaacttccgcgaggctcttcttgaccctatccacacagctgtctacatcactttcatgctcgttgcttgtgccctgttctccaagacctggattgaggtctctggctctgctcctcgtgatgtcgctaagcagctcaaggaccagggtctcgtcatggctggtcaccgtgaacagagcatgtacagggagctcaagcgtatcatccccactgctgccgctttcggcggtgcttgcattggcgctctgtccgtcgcttctgaccttctcggtgctctcggtagtggtactggcattctccttgcagtcactattatctatggctacttcgagattgccgctcgtgagggcgatatcggtggaggtctcaagggcctcgtcccgggcaactag

SEQ ID NO: 27461 - DNA, 861 bp, Emericella nidulans
tccgcagtctgccggagcgggtggtactcctctaatgggtatggggataaaatgcgcgagtatctggtcgactggcacaagaacaagaaagaggacgaagacaagcccttcttcgcatacctgccctttacagcgccgcactggccgctgcaagcaccccgggaatatatcgaccactaccgcggcgtgtacgacgacggacccgacgcactacgtctcaaacgccttgcaagcctcaagaaacttggcatgattcgggaggatgtacagcctcatcccgttgtcgtcgacgaaggcgaaggtaaaccctgggaagaactcacgccggaggaaaagaaactctcctgccgcgcgatggaagtctttgcagggatggtcgagtgtattgacgccaacgtgggcaagatcgtcgattacttggacagcatcggtgagctggacaacacattcgtctgctttatgtccgataacggcgctgaaggagctgcgtacgaggcatatcccctcgtgcagagcggtgttcttccacacctactaaaatactacaataacagctacgagaatctcgggaacggggatagtttcatttggtacgggccacgctgggcacaagctgccacggcgccgagcaggttgtacaaagcgtacacaacggaggggggcgttcgcgttccgtttttagcacggttcccttcgtcaacgaagacggctccccaggcttctaatggggcaatcacagatcaattcgcaacggtgatggatctagcgccctcaatcctctccatggcgggcgtcgctcatcctgcctctaaagctttacagaacccacgcggcccttccccacaacccactccccgataa

SEQ ID NO: 27462 - DNA, 873 bp, Emericella nidulans
cgtcaatcctgcacccaatggaatgtccctaacaattcggacgacgaaatcgataacatctcgtccgccatcaaagaggtctctgaatcctccggcgtcgacccccgcttcatcctggctatcgtcatccaggaaagcaacggctgtgtgcgcgcccctaccaccaactacggcgtcaccaacccgggcttgatgcagtcgcacaacggccagggctcatgcaacaatggcgaggtcttgaccccatgccctgccgagcagatcaagcaaatgatcaaggacggcaccgagggtaccagcgatggtgacgggctcaagcagtgcctcgagcaggcgggcggtgttggcgatgccgccaacttctacgccgccgctcgtatctacaactcgggctcgatccctgcctcgggtaaccttggccagggtatcgcgactcactgctactcgtcggatgttgccaaccgtctgaccggctggtctactggccctagcacctgcgaggacaatgtgatcgggtctctcgacaaggccgtcaccagcattttccggttcacctccagcttggttggcggttcagactctgactcgagcgattcggacgattcggattctggctcgaccgagtcttctacatctaccaccactcactgtcccgccgcccccaccgcttcgtccggttcatcctctgcgccaatctacccgtacgccaactcctcctgcacgcagtactacaccgtcatggacggcgactactgcctgaaggtcgaggaggctattggcgtttccctcagccaggtccgcgagttgaactccgggctgaaggaagactgcacgaatctctggctgggctaccagtactgcatcaaggcttag

SEQ ID NO: 27463 - DNA, 711 bp, Emericella nidulans
gcctcggcaagccagaatgcaatgagccaggctgctgttgcgcccaccctcttctattttgcgccaaaggacatctggatcttagcctaccaatggggcccaacctcgttctcctacaagacttccagtgacccgaccaacccgaacggatggtcaaccccgcagcctttgttctctggtacaatctccgactccgccacggggtgcatcgaccagacactcattggggatagctccaacatgtacctattcttcgcaggcgataacggcaagatatacagagccagcatgcctatcgacaacttcccgggggattttggcacggaatctgagatcatcatgagcgatacatccaacaacctctttgaagcagtacaagtctataccgtcgacggccaaaaccagtacttgatgattgttgaggccatcggcgccaacggacgctatttccgctcgttcacggccgacagtttggacggtgcgtggacagcgcaggcggccaccgagagccagcccttcgccggcaaggctaacagtggtgcaagctggaccaacgacatcagccacggcgatctcgttcgctccaaccctgaccagaccatgacgattgacccttgcaacctgcagctgctctaccaaggcagagaccccaacgccagtggtgactacaacctgcttccttgggttcctggtgtattgactctccagtaa

SEQ ID NO: 27464 - DNA, 2556 bp, Emericella nidulans
aagaaacacgcctgcacataccccggctgctccaaagccttcacgcgcgctgaacatctccgccggcatagtcttaaccacgagacgatcagtaacagccagggctacacatgccagcggtgcatgacgcacttttcccgcgcggatctcctgagcagacatctggaccggcatgcgaagaaggatgcagaggcaggagggtttgggaagggtgttctggagaccaggaagaggatgcgcagggctgaggacggaagtatcgtgctcaggccgccgaaaaggccgtcgagacaccagcagaagacaggcccgcccgttggggcccctttatcgtcttcgggctctgtctctgccgggtctgggaggagttcgcggtcgccagacgtcagcctgcacgctgcgcaggcccccgtctccccgccgcggtcggcgagcgaccctgtctcggtctctggggtctccatcgacgacgatggaactgacccggatccaatgctggccccaatgatgccggggggcccttttgagccgtatgtcgagccaattcccggtcaattcgatgcggcagatgggtcatggggtgggtttgatgctctaggcgatggaatgatgctggacacggcaacgggcaactacaattggctcttcgacgtctcctccctcgacgacgcattccaccacctcgagctccctcttggtcctgatctcgtcccctttgcgaattcccacgggaactacgcgagtgtgaatactatggagctgtctggggccggggcagagaatgtccaggacagtatgttgaatcttgatctggatatcgacctgaatgggctccccgctgggtttgtgcatgaccaaggcccggatggatcgtcggcttctgttctactacaggcagcgagttttgtcgaacggggcaatatcaacggcagtgaccccaagcgagactttccagacctagactggatggccggtgcgccgcccatcgagagcaccgttcccgtgcgccctcaactgagcgaagatgcacgaagagggatcttgaccctgatagcgcagagtcctccagtcgacatacacggccagccgctaaaccttgactcgccgctcctctctttgtcggcgctgcagagctacagtgacctgttcttctcccgcttcaatactacatacccgctcatccacagcgcgacctttgatccgaacaagactgagccggtcttcctggcctcgattctgtcaatgggagctacgtacagcagccgtgaagcccatcagctggccgtaggtattcacgatggcctgcggaaccagcttttctgccacggcgcgttcagcccgcagccggacgagctctgggtgctgcaggcgatgctgttgatcgactgctttggcaagatgcgcgcaggcccaaaacaaagggagcgggcacagctattccactgtgtgctgatcaagcttatccgccggagtacttgctgttcgatccgggcagatacccattctgacccagggttggggggattagagctggaagacgcgtggaagagggccatggacgccgagcagcgcaagcgcctcgcgttccagtgtttcatgtgggatacggagcattcagtgctcttcagccagagtttgtgcatgtctgcttttgagatccgctcgtcgctgccttgctcgccagccgcgtgggaggcacatacggcggaagagtggtcccgacatgcttcgagagatacagaacatgcatttcttcccgtgctgaagggatacattacccctggctcggtctcccgaccgcgcgatctgaacaggttctcccggatggtcgtcttacacggcctcatgtccatcagcgcagacctgaaacggcgcgatcagacaacattgcgcgcagagacacccgaacgagtcggcgcctggacgccgcgaatgggaagggcgtatgacctctggaaagcagatttcgacgccgactgtctgaacatgaaactcgggccggtgcaggtgtcagcagacgagacgagacggtttacgagtcttaaagccgcggcaatggcactctatcgtgccgccagccttgcactccatgtagaagtactggacctgcagatcgcagcgggcgcatcgcatatccttgggcgggttgtcaaacagcatgatcgtgagaggtcccgggttatgctctctcgctggttgtctggtccatctccagccgcgacaacagcgtctcgccatgcggcggctcttctccaggacgctgtgctgagcttgcacgactgggaccagacagacgcattccactttccttggtgtctgtacctggcgacgctgacggtttgggcattccacgcgcgcgagggttgtgtacccaaaccgacggacctgtcgagtcttattgtggccatgacaacctcgaatgcggccgatttagaagggctggcagggcagtatgatacgcggccactgatacgggctatggcgcagcagctggctacggtacgatgggcggttgtgcacgatgctatgaaggtcttgctgaatcttggtgtttga

SEQ ID NO: 27465 - DNA, 1089 bp, Emericella nidulans
gctatcgatttacctttggaatatgagtcatcattcaagctccaagagcaagttagtgatgactcaagtctgtcacagggcgtacctttttttggcttgattcaaatggacttcgtcccgcaagatccttcaacattcaaaccatatctgacaacaatggccagagttgactttgtcacacttgacgtcttcacgaccaagatttatgagggcaaccccctcgccgtggtcttcctccccgcaccgacatctacccaactgacccagcgccaaaagcaaaccattgcgcgcgagttcaacctctccgagacaatctttgtccattctgagtctgggcccagcgagtctcgtaaaatcgacatcttcaccgggagcgaagaactaccgtttgctggccatccaacgatcggagcggcgtcatggttcctgcaccacgcgccagagagcaaacctgtgacaaggctgactatgaaggccggagattttccaataacgttccagaatgcggacttgggtgtagtttccgcgcgggttgcgcacaacgtgcacatccatgagaaccagtacccgcttgatgagatactgcgactctacccatccgtcaagccatacttgacccagtcatcgattgccttgatctccattgtgaaaggtatgagccagcttctcgttgaattgccctcgcttgaagctctgggtgctgtgacgactgcaaatggtggggaagaagcaagttcatcttatctggacgccggatgggccgaggggatggttacgacgtacttttacgtcaaggacgtcaaggacgagcttctgggtcgcaacgttatccgcacacggacgattctggggagtctcgaggatcctgcgactggcagcgccgcgagtggcttaacggcttacctctcgctgaaagagggcagggctgggcggttcgtgtacgacattgtgcagggtgttgagatgggtcgacgtagtgagattgggcttgaggtggtgacaggggaaaagggcattgagagcctagagctgagggggagtgctgtgaaggtcagcgaggggtcaattgttgttcctcaggccaagtga

SEQ ID NO: 27466 - DNA, 390 bp, Emericella nidulans
tggcgcggtggttgcatcatccgctccgtcttcctgaaggacatcaccgaggcttaccgcaatgaccccgacctggagaacctgctcttcaacgacttcttcaacaaggccatccacaacgcccagaagggctggagaaacgttgtcagcaagggtgctctctggggtatccccactcccgccttcagcaccgctctgtccttctacgacggctaccgcacaaaggctctccccgccaacctgttgcaggctcagcgtgactacttcggtgcccacaccttccgcatcaagcccgagcacgccagcgagaagtaccccgctgacaaggacatccacgtcaactggaccggccgtggtggtcaagtttccgcctcgacctacactgcttaa

SEQ ID NO: 27467 - DNA, 630 bp, Emericella nidulans
ggggaccgggctgtcaaattcatcatcgagtgtttccaagacaactaccccgagtgcctcgggaatctgctcatccacaacgcgccctggattttctcaggcatctggaagatcatcaagggctggatggacccggtcattgtctcaaaggtgcacttcacgaacggcgcaaaagatctcgccaaattcatcgacatggacaagatacccaaagagctaggcgggaacgaagactggacatatgaatacgccgagcccgtcgagggtgaaaacgccttgatggaggacacagctgccagagacgctctgcaggcggagcgcgccaagatcggcgaggatctgctccgcgaaacctcgcaatggatcaaggccggtggagagcataacaaagaagaaataaagaatattcagagcaggcgcgatgatctcatcgaacagctgcgtctcaactactggaagatcgacccgtatacgcgtggcaggaacacgctcgaccgcacaaacgttatccaggctggcggtaagattgagttttatcctagcgaggttgctgcgcccgtggatgagctcaagaagctggacatagagcatgttgagcgggaagaagtgaaggtgaatgcggtggcttag

SEQ ID NO: 27468 - DNA, 1071 bp, Emericella nidulans
caggtaccgcttctacgtctccaatgtggcaaggttggccccgagtcagcagctgcaaaatatgcagcggccacggcgccctccgatttcactattgaagcagacaaaccttatgcagaagataacttggctttgatgtctccggaagttagcgaacgatatggtggcaagcttccattcctcttcaaggtgctgtcgatccgtaaagctctcagcattcaggcccatccgaacaaaaagcttgcgaagctcttcatgcccgggatccccgaaactaccccggtagatgacaaccacaagccagagatgaccattgcaatcacgccttttgaaggcctgtgtggcttccgacctctggctgagattgtccattttcttaaagccgttgcgccccttcgttacctcatcggcgtacaaactgcaactgactttgagaatgcggtacgcggctttgaaaacaccgaggatcctgaacagacaaagaaaaataaagtcgcgctgcgaactctctttacctcattgatgcaatctgcctccgaaaacatcgagcaagccgcgagagagctcgttgcagctgctcagagctccccagagacgttcgcatcgctggtcaatgctcctgatacgaaccctactaacgccgctgagttggcatcaatcataattcgactaaacgagcagttccccaatgatattggcttgttcgtcttcttcttccttaactttgttcgtctcgagcccggagaggctatgttcctcaaggccgacgatattcacgcctacatctccggcgatattatcgaatgcatggcatcgtccgacaatgttgttcgtgcgggatttacacccaagtttaaggacgtggacactctcactgagatgttgacgtactcgtatgcgccaattgacgagcagaagctgcagcctacggactatccatacacggtgctgaatgctgcggcgtactcgagtgcttcagattcgcttctttatgatcctccaattgaggaattcagcgtggttaagacgtccctccgccgcacaggggcgaaacgacatttgatccgctga

SEQ ID NO: 27469 - DNA, 615 bp, Emericella nidulans
gctttcttcccccgctactgctcaggcgacttcgcccctttgtttcagctcctcgacgactacgatatgcaccaggccacccgccgaccaaacaagaaggtcaccaacgtgagaacatttgttcctaaatttgacgtctacgagcaaggggatcgctactatcttgatggagaacttcctggagtctcacagagcaacattgagatcgaattcaccgaccctcaaaccctagttatcaagggtcactctaagagaaattaccaccacaaatccgagcctgataccgatgacaagtccgagacatcatcggtcaagtctcttcaacccacagtcgaggattgggatgagatggaagatgctacacctgcggtcgagcaaactccatctttgggccccaaggaaaaagctgtagagaagaactccagcaccaggagtcaggaacctgcctacaagttctgggcatctgagcgcttggttggagaattctctcgaacctttgccttccctaccagagtggaccaggacgccgttagggcgagcttgaacaacggtattctgtccgtggttcttccgaaagaaccagctcctcaactcaagaaagtccgcgtggagtag

SEQ ID NO: 27470 - DNA, 1710 bp, Emericella nidulans
ctggagggcctgtacgaaacggaggcggaagaggagtcttctaagctttatttgacgtcttttgaaccggactacttagaggcaagcgcagcgttctatcgcgccgagggcaagcgactgctagaaacggtcgacgctgctacgttctgcgctgttgtctctgctcgcatagcggaagaaaaggaacgctgtcagtatacgatctctctccttagcgaatcaaaaatcaaggagatagtggataacgagttgatccgcaataatttggccgaagttgtcaattttgaggggaccggggttcgagtcatgctggaccacgacaggatagacaatctaagcaagatttatgctctcagcgcacgggtggatcctaaaaagacccatctgactgccgctgtacagaagcgtatagtcgaaatgggtaacgaaatcaacaatgcttcatttgctttagcacaggcacctgcacagcctaagtcaactgggacagacgcaggtcagaaaaaagagaaggaaaaagagaagcccgtgaatcaagtcacatcatctgccatcaaatgggtggatgacattcttgccctcaagaagaagtttgatggtatctggaaagatgcctttgggtctgaccaggtgctacaaagcgcgattacggcaagtttttcgagcttcctcaattccaccccccgcagctcagagtttctttcgctcttttttgacgagaacctcaagaagggcgttaagggtaaaacggacaacgaggttgatgctcttctagagaacggaatcaccctgctgcgttatatcaaagacaaagaccgctttgaggcctactacaaaaaacacctttctcgacgactactcatgaagcgttcgatgagcatggacgcagagagacagatgatctccaaaatgaagatggaagtcggcaatcaattcacccagcgattagaggccatgtttagagacatgaccatatcggaggatctgactgcaagctataaacagtttgtacgggaacagggtgaccccgataaaaagcgattcgagctggacatcaatgtccttaccagcactatgtggccaatggaaataatgtcgagctcaagggatggtcaggttgagcttccgtgcatcatccctaaggaggttgagactgtcaagcagagctttgagaagttctatctggacaaacatagcggccgcaaactttcgtggcagccaagcgagtccctcacattcgaggagatccaggcgcgcacacggattccagataacgatctcattcgaaacttacagtcacttgccgttgcacccaagactcgagtcctcaagaaggtcccgatgagtagggacgtcaaaccgacggataagttctatttcaacaatgatttccaaagtccattcatgaaagtacgaatcggtgtggtcagcggcggagccaacaaggtcgagagccaggaccagagaaaggagacagaggagaagatgaacaacgagcgcggcggcagtattgaggccgctattgtgcgcatcatgaaacaacgcaaaacattaatccattcaaaccttattagcgaagtgcttagccagttatctgcccgtttcgtacccgacgttaacatggtcaagcggcgaatcgaaagtctaattgatcgcgagtacctcgagcgtgtttccgaggaccccccgacatacggttatgttgcgtga

SEQ ID NO: 27471 - DNA, 1758 bp, Emericella nidulans
aatcctggtgtcggtggtccggttggaggtgtccagatggtcaataatggttcgatggtaccccgtaatgatggcagtatgaacaattcccctgaagtcatgatcggcaacctcaacacatatatttatgactacttcctgaaacgcggttaccatgactgcgcacgagccctcgtcaaggatgaatcaatcaagctcaacactgaacctcctatcaagacaagtccgggtcaacgcagggagggcgaagtgaatggtgtcgacggcgacgcggtgatgacagacagtaaagacggtgacaaactgaagattcccgacgacttgcctcgtcccaatctcaacagcgaaagtcagtcgtcttcgttcctcttggattggttcagcctgttctgggagtttttttggtcccagcgtaagaaagggaacagcgccgatgtgaggcaatatctccaacacactcagaatatgatgcgcattagagagcagcaacaaagtcaaatgttccgaaaccagcaacaaatgatgccgggtcagatggggcggctcaacaacatgcgtgggaacggaatggtccctcccaacttacagaaggccgtcctgcagaataacactggtggcttctcccagcagcaatatgcgcaactacaacaaaagagtcaacagatgcagatgatgcagatgcaacgcgagcattctgatatggatatgaacggccaccgaccgccctctccatcctccgccgagaacgcgccatccccgtcgaaacgaccccgccttgaaggtggtcccatgaatgggcaacaactggcacccaacggacgtggccagggtcaggcgatgcctggccagcagaacccgatgttgatccagaatggacttacgccgcgcgcgatgaaccctaaccagtttggtgcttttcagcaatcgggtccggctgcacagccaaaaccaatccaggtatatgctcaaaacttggctctacatcactctcgctcagcaatgaataaccagggcatgcctaatggtttaatgaatcccggcgtgatgccgaatcaggctgatctggttcccatgtcagacggccagggtatgtatcagatgaacaacggcgagttttatccgaatggccaaatggcgcaggttaggcctggggctcaaactcctggtggccagcatggtaaccatgctctccaggactatcaaatgcaactcatgctccttgagcagcaaaacaaacgccgactcatgatggctcgccaagagcaggacagcatgactcgtggccccgatggtcaacccttgcctgggcagcagggccaacagcaaccgggtcaaatgcctccgggtacttctccccagggcagtaggactggggcgtcgccaatccctaacgaccaaatgaagcgcaacactcccaaattgaatcaatctggtcttccgaattcaccgaacgctcccgacgcaatgatgcagggccgtggttctcctgcttcaatgaacttcaccgggcaactaccccccgaaatggcaggccaattctacatcaagacgatgcaggaaggtatgcagggcgccaacggtatgcggccaccgagctccaacccggcatttagtggcccgcaaatgggcaaccagtccaggctggcacggcgaatcgaatgccgaatggaggctggcaacaacagccaggtggtcaacgtgttgtccacaacaatctccgataatacagccccaactaacggaaacccgagagtgtga

SEQ ID NO: 27472 - DNA, 825 bp, Emericella nidulans
cactacaacgaacgcctcatcagcgaagagatacgggccatcgctcgcaaaaacagccgtgaggcactggaggctttcctccagcaacaacgcgaagcagccggagagttagaatacaccccgcctctcgaggatctgctcctgaccgccacagactgtcgcgccaaccaggtcgcagcctactgcctggaacacggccagaaggccacgcgagaaatgatgacgtcggttgttgtccacaactccttcgccgtgtaccgcttgatggttaagcacaaggtggttcgcatcaactttgttgtcccctggtacggcgatattctcggaacaatggcctccgacaataagatcgactgggtgcgattctgcctggagcacggggccaatccgaacgccagccttgtcgaggagcatctgagcgcgttggcgtgtgcggttcacactggcaacgtcgaactggtggatttgctgctcgcgcatggggcaaggctgaaggggagtaatgcaattgtaagggcggcgattgatgaggacctggagatggtcaagtatcttctgttaaggggggctgatattgacgaggttgggatcaagggcccgccaggcgctgaggcttatggtgatatggggagtccccttcatcaggctgcggtagagggatacatggagatggcgcttttcttgattgaggctggggctgatatctatcttaaggatccgcttggacgcactgcggaagaccttgcgctggaaaagggacatatggaaatccttgatgctctgcgccaaaagaagatgaaggataatgtggacattaaggaatga

SEQ ID NO: 27473 - DNA, 1002 bp, Emericella nidulans
tctgttgtcattccgcccgttcctgttggtcctgacggccagcctgatattcagtacctgccggatcccgtgaacaaaactaacaagctagccctcaacctgcccatcggccttgtcaaccaagagacattcccgctgtacaagctgcacaatagcctgcgcctgatctcacgcgagatccatctcggccgcgggttcaaggtcattcgcggggtcccggtcgaccagtacacgcgggaagagaacttcatcatctacgctggaatcgcctctccgcggccgccaggacaacaactggcagggaaagccgacgtggtgctggcccatatcaccgatctcagccgcaaggtcgacaccaagacgatcaaagccccggcgtatacgaccgagaagcaagtcttccataccgacgcaggggatgtgattactctgttcgcacttcaagaagcagcagagggcggccagagctatctatccagcagctggcacgtatacaacgagctggcgcgcaccaggcccgatctcatccacactcttgccgagccctgggtcgccgagcagggcggcgatgtcgttagccgcccattgctatactatcagccccagacatcgagctctccagagcgactgatcattcagtatgcccggcgagggttcacggggtactggggtaaacctcgcgctgcgacactacctccgatcacggaagcccaggcagaggcgttggacgcgctgcactatttggccgagaagtcggcagttgcgcttgatttccacaagggcgatatccaggtcatcaataacctgtcgatcttccatgcacgcgcgggcttcactgattctgacgagaagaggcggcacctggtgcggctgtggctccgggacccagagttggcgtgggaaacccctgagagactcaagtcgcggtgggagtatgtttacgacggagtggatgcagcaaagtcaattttccccctcaagccttttgtccggagtcagtag

SEQ ID NO: 27474 - DNA, 591 bp, Emericella nidulans
gagcgcgtaatgggcaccgaagtcggccacatcttccaacgcaacctcgaaaaggccggcgtgaagttcaagctctccgccggcgtcgcgaaggccaccccctccaatgaagaagcccgcaaggttggcgccgtgcatctgcaggacggcaccgttttacccgccgacgtcgtcatcctgggtgtcggcgtccgtcctgcaaccgatttcctccaaggcaacccagccatcacccttgagaaggacggctccatcaaggttgacgagcacttctccgtccctggtctgaacaatgacgtcttcgccattggcgatatcgccacgttcccgtaccacgggcccggcacagatcccaaaaagggcacatacacacgcatcgaacactggaatgtcgctcaaaatgccggccgtagcgtcgcatcctcaatcttgcacatgctccacaacaccacctcctccctgcaaaaggtcaaaccaaaggtctttatcccaatcttctggtccgcgctcggctcacagctgcgttattgcggaaacacgataatgggatgggacgacctggtgctcaaggcgagcccgagaatgctttag

SEQ ID NO: 27475 - DNA, 522 bp, Emericella nidulans
agaatcacctccattgcatcgctcgtcctggtgggatgcgccctcgccgcaccccctcaaccccaattcgaaggcctcggtggtgaaactcccagtcccaccccaaccagcctcccagtaccatccggcagcgcctctcccacttttcttccccctcctgggcctcctgggcctggagagagcagtctcccgttcgccgtctacggagccaggggtcctccctatgccgaaggaggtgagggtttgccaactccctctggcggcccataccccaccggcttccctggcagcggtatcccgccccccgtgcctaccttcagcgttcccatcgacgctgtcaagcgccaatttgagggcgctcctgctttcggcggagagggtgagggccagggtccacctctggcgccaacaccgagcgtccccggctttccctttggccctgggggcatcccatctggcgctacgcctactcctagcggtacccccagcggtatccctagtgggtttccgttccaggcgtaa

SEQ ID NO: 27476 - DNA, 1215 bp, Emericella nidulans
aatgcccaacagcccatgcactcgatgcgcaccggcagagacatgaccgcgttaagtcaatccatgttcggccccgttcctgctgccaacgtgctgcccccgatccgcaacaacgtccaactgccgccgatggaccacgccgttccgccgcagtatcgccgacaagacccgattgctcagcctgaacaggccctcaaggaggagaaacctaccggtggcgttgccgcttatctggactatgagatggatcagatgtccgactttgtggctgagatggcccagggaatgtatgacttgtacatcaccaagatcaacctatcagatattgacttcgcgcgaagcgtctacccaggatcatctgtcccgccccagttccggaaatacgtcttccagattttgtcctcaacacgcctgccgagttccaccatccttctgggtctctactacctgtcttgtcggatgcgtatgctctcttctgccaagatttacaacgctggcagtggccaggtctaccgcatgctcacggtggctttgcttctaggcagcaagttcttggatgacaataccttccagaacaagtcttgggctgaggttagcaacatttccgtgagtgatctgaactctatggagctcgaatggctcttcgcttttgagtggaagatccatgatcgcatctatgaccagcaggacggattcgcttcatggctttctcactgggagaaatggcgtgccaagtcttccatcagggctcacgaacctcgacgctccctcgctcccatcgataccaacatcacccgcagcaaccgggtttcgaagccgcttctctctcccgaagggccgattcccccacagtatcagcgaaacaaccaatacgagaactcttggcttaacccagcagcatcagagtattccccgccatctgctcctcacagtggaccgacaactccggactactactcagttggcccatgggggtactcttctaaccctccaccgccatattcgagtacctggatgcctcatcatcagtacatgccgccccctcgttcgcagccgccatcctaccaccacactccatcctacggtttcccgtttccgcacggtggttggacgactggccatggtgcctcctgcggttgctcgtactgcgccaaacacatggaacattacatgtgtgctaacctcggctccatgcaaccaattctcgctgcttga

SEQ ID NO: 27477 - DNA, 597 bp, Emericella nidulans
cgctttattcagaacctcctcccgctgctggaggcgtcgagcccaagccgcgtgattagcgtctacggcggcggcttcgagtactccataaacacggccgacctcgacctcaagcacaacttctccctgctcaacgcctacaagcactccatcaccatgacctccctgagcatggagcacctcgcccgcacccacccggccgtcagtttcattcacgtctacccgggtctcgttggcaccaacatctacaccaacagcttcccagctccggtttcgaccttctacaattacctcgtgtggccgttcatgaagccgttttccgtggatctcggcgagagtggcgagcgacatcttttccatctgagctcggcacactacccagcaaagcagggcattgtgccccagggtgttccgctggaggctggcgaggtcgctaaaggcattactggggaaccggggagtggcgcctacctgttgaattggaagggggatgttaggccgagcaccaagattctggcgcagtatcgggagcagaagatacctcagttggtttgggatcatactgagagccttatggaccaggcagttcatcgatag

SEQ ID NO: 27478 - DNA, 552 bp, Emericella nidulans
tccctgttcacgactactcctagtgtcagcagcttcgcccccctcttcaacctgctggacgattacgacaaccacttggcctccagaaactgggggcaccacacctccgtgcgatcgttctctccccgctttgatgtacgggaaactagtgacacctaccaccttgacggtgaggtcccgggtgtcgcgcaaaaagacatcgacatcgagttcaccgacccgcagactttagtcatcaagggtcgcgttgagcgccagtaccactctggcaacaccgacgacactggaaagcaacgtcaggttgaagatgaaaacgaaagctcaagcaatgaggtcgctaagaccagcgaaaagcaaatgaccaaatccgcgtcaagtgaaaagccacgctactgggtgagcgagcgctctgtcggcgagtttcagcggaccttcagcttcccgtctcgcgttgaccaggaccgcgtgcgcgcgagtctaagggatggcattctctctgttgttgtgccgaaggaggcacctcccaacgcgaaaaagattaccattcaatga

SEQ ID NO: 27479 - DNA, 357 bp, Emericella nidulans
cacgagcgcgatcgcaagaagcagcaggaaaaggagcgcgcggagagaaagaaggcccgcgctaaggtctcacctaatgcgctgagaggcggtgctactgagggcgagggtaaggtgttgggagaggttgagaatacggacgacgaggtggatgatgccgagaatgaagaaaacgctgaggactttgcgactgcgagtggagtgccggagtggggtaagaatgccagaaagagggctaaaaagcatgcgaagaagctggagaaggaggctgaagagacgaagggtcccaagttgacagaggagcagatcaaggagcttttggactggagtgagtcggaggatgagaagaaggcttaa

SEQ ID NO: 27480 - DNA, 744 bp, Emericella nidulans
ccaggcccagctccgaaccttttcagctttcaagatactgatgccctggccaagcaattacggccctatgtcctccgcaatcaaaacgcggccctgagccgtcacaacactttccgcgtcgcagtatctggtggctctctccctactgttctcgcgaaagctctcctcgctcccggagatggtaccccagaggatactgctcaattttccaagtgggaaatcttcttcgcagacgagcgcgctgtccctctcgatcacgaggacagcaactaccgtcttctgaaggacgagctacttagcaagataccttcagaactcggctcacccaatgtgcacacgattgatgagaagcatgtcaatggcgaccctcaggagttggcggatttgtaccaggaagagctgatgcgctcctttgcggccaaggacagcgttaagctgcccgttttcgacctcattcttctcggctgcggaccagatggccacacttgcagtcttttccctggacatgaattgctacgggaaaaggatgcgtgggtgtctgctatcagcgactctccgaagccgccaccaaagcgcatcacactcacattgcccgtcgtcacgcatgctgtgagtatcgccttcgtcgccactggtggaggaaagaaggatattctcaagcaaatcttcgatgcaaaggaagggaggagccttccgtctgcgctggtcaaccagggtgggggtgagaaacataggaaaacctag

SEQ ID NO: 27481 - DNA, 1218 bp, Emericella nidulans
gagcaaccatcccaaccgcaaggccagcaaaaggcccccaaacccgcaaaacccgccaaacaaccccctaaagacaaaactgccacatctgcgtccaccgacggacaaggtgacgagaagctcacccccgcagagctgaagaagaaggccaaagcggaaaaggcctcccgtcgcgcccgggaaaaggctgaacgcgagcaaggaggtgcacctggtggacagaataccccggccggcaagaagggcggcgatgctggagctccggcagcggggtcagcagccaaaggacagaagtctattcctagacgggggtctgcgcagactgttccccaggccgaggaggtcaagaagaagaaggagaacaagaacgtcgctgtgttcgatccctcggtcccagaagcacaagcaaagacaacactttgcgaattcatcgacagtttcatacgcgagaagattacggtggcggaccaagtcattgccggcagtgcggcgcagaagatcaaggacggcgacgttgtcgtgacattcgcaggtagttcaattgtgaaacagacgctcctcgccgcgtttaaacagggcaagaaattccgcgtttcgatcatcgactcccgtccgctctttgagggcaagaatctcgcaaggacactggccaatgccggcctcgaagtgcaatactctctcatcagcggtctcagccacgccgtcaaggaggcaacaaaggtcttcctcggcgcccatgccatgaccagtaacggacgactgtactcgcgcgtcggcacggcgctggtcgccatgtcggctaaggagcgcgccggcggcgtcgaaatccccgtcatcgtatgctgcgaaactgtcaagttcacagaccgcgttgcactcgacagcattgtcgtcaacgaaatcgcggacgcagacgagcttgttccaacgcacccacctcaccagctaacggacctgcccgatcaccgtgccgctgcacagcccgagccgaagaagggaggcaaatccgaaccctcgaaccctagcccatctgaatcaactgcgccacaaacgaacagatctccacttgcggactggcgtgatacgccgaacctccagctgctgaacctgttgtatgatgctacgcccgctgaatatgtggacatggttgttactgagatgggcagtctgccgccgagcgcggtgccaattgtgcatcggatgagtacgaatctgtag

SEQ ID NO: 27482 - DNA, 681 bp, Emericella nidulans
agccaccttctaatactgaaacaacaaattgtcgcatttgatatcgaatatgtggcccccgaagtatccttcgacttttcgggcgtcacaaacaccttctgggaacttcgcgaacgcggcggcctcttcaaccctcgcaacctcatgcgactcgttggtcacggactcctcccgcgtgtggtggaaaacatgcttgacgccaaagttgaactcgacggccgtcttagaaccgtgatcaatgacttcataaatgacttcgcgagcaaaatgaccgcatcgctcccgtcgaaattcgttgacggacgaaacctgcagcatggggaacttatctaccctacctgccgcaatgttgaggccgaggtttctcatctacgcaaagtcctcgacgactacctcgatgatatccgtatgaaggaaacccttgttggtgcggtccaggaccgtgtaattcaaatatacgaggagttctttgtcaagttcacttcgtcggagaagaacaagggaattgccgttagcaagaagggaaagggccgtgaagatgctgtgtgggatgttgataccttttcagattggtgcgaaggcatcttccgggtcggggttgcatcgcaggatgacgattatgatcaggttacgagtcggagtgtgagtaggactgggagtttggggtctcagtttcgataa

SEQ ID NO: 27483 - DNA, 1104 bp, Emericella nidulans
atttccgcacaggatgaaatcacatcaatcatcaagaaacgatccgatttcgagcacaaaatcaatgcgcgcggcgctcagccggccgactttgtacggtatgctgagtacgaaatgaaccttgacagtctccggcgcaagagagtaaagcgactgggtatcaagtcgacaggattcagtgggcaacgtcggatattcttcgtcctcgatcgtgccactcgcaagttccatggcgatatcggtttatgggtccagtacatcgaatatgcccgacggcagaaggcatttaagaagctcagcacaatcttgatggatgcattgcggctccatccaaccaaggctgacttgtggatttatgccgcacattattctgttgaagaccatgccgatatgtctcaggccaggacatatatgcagcgagggttgaggttctgtaagacctccaggaagctctggatccaatacgccaagttagaattgatctacattacgaaactggtcgctcgacaacggatactgggacttgatgagaagcctgagggtcccaagcagcaggtttccgaggatgacctcaacgccgacatgattatgatgccacagattacggaggaggatatcaaccccaaggcacgggatgataccatcgatgaagcggcgctgaaaactctcaactcaactcccgcactcaccggtgcgatcccactcgccatcttcgattccgctatcaaaaccttcgattacaatgattgtttcgcccacgagttctttgacatggtcttcgagttcgaagacgtaccctgccttcagaagattctctctcatatcctcgacgtaatgcaagagtccaagcccaatagccctcatacactgatatgctacatcaaataccctacggctggcgttagggtcacttcggccgagttcccccgtgcactgggagcggcgctctcgcgactgcaagaacaccgccagaaacctcaagtggcgaaggaggtgattgactggttacgtccagtcgagaagacgaaagatctggacccatctatccaaaaggttatcgctgccacgattcacaaagcggagctggttcttcaggaagcgtag

SEQ ID NO: 27484 - DNA, 1287 bp, Emericella nidulans
gaacaggccctgacgaagccgcgagaatggtatatctcctcacacacgtttttgcaacactccggtgatggaaaggtgcaacggcgcaaggcgaaccatttgacactgcacgttagtgaaggactcttgcgagatttggaaattccggagttagggcggccagtcgcgctgggggctgtttttgaagatgccgtgtggaatcggactatggtcccggtgcacttgtataaagccagcgcagcgagtctgcgaaaaccgcaatggggacttattgatacaacaactttgagcccttggaatgttatggtgtgggggttgaagcagatacgtggtgttgttgttggatctggcaccgatgctcctaggttgcagactcaggatttggttctggtaagcaaccttcaggaggcggcagagaagcttgttaagcaggtgttggacgcgagcccttccagaacagatctggttttttccaaagaaagttttgtcgaagcctttggcacgattctaaatgagaacagcgagctttccaataccgactacgacgttctattgctctatttatcccgcgacaagggtgccattgcatatgatggcaagacgatcaggttccggcccacggatgattctccaagagagattactgaacaagatacggcgatttccttgatcaagtctctcacagcaacgatgacgagacagattggaagcctggaaaagaaaatcgccgagcttaatgcaaccgcaagagccgctcttggtgataagaaccgcgtatcagccctcgctgcattgcggtcgaagaagctcgccgagcataatctacagcagagacttgatactctcgcacagcttgagcaaacccagctcaagatcgaacaggccacggaccatgtcgagtacctcaaagtgatggaatccagcacgggcgcccttcgaggtctcaatgctcaactcggcgatgtctccaaggttgaggatgtcgtctatgacgtgcgcgaggaaatgtccaaagtggacgagatcggaaacatcatgggtgaagctgggccacagattgatgagactgagattgacgaggagctcgaagggctggagttcaaggaacggaaagcgaaggaagagcaggaggcagagggaaccaggaagcagctcgccgagctcgacaaccttggtctggaaaccaaaggggctatccggaaagcaccagtggggcagaacgtcgattctgccttggaggacagcattgaaaagctatcccagatgtcggtcgaagaaggagcttga

SEQ ID NO: 27485 - DNA, 1080 bp, Emericella nidulans
gaccgtcgactgctggatcatttcgtctacggcttcagccgcgtcctgaccctcattaacgatgactcgaacccctttaaagagatcttacttcccatggcgacgcaacatcgcggcctcatgcactcgttaatgtgcctctcaggctcacatctatcggggttgacccccgaaccaagcgtcaaagagcgcaaattctaccacttccaccgcgcaatccgagacctcaaggccaacatcatcgctcgctcgaatatgactgaacaatcaaagacgggcgagcaagaacccgaactcctttccgaagaccccatcatcgcctccacaatcgctctcagtctgaacaccatctgcgagggcgaaaccaacggcgagtaccgtccacacatggacgcggcacggtacctgctcgtcacccagaaaccccgcaacgaaaactttcgccagttcattgtcgagttcttccagtaccatgacgtatcaaattccatcacctcgctcgatcgaagaccggctcatctcgacggtgaattgcgtctccccgatttcgtcccacatgcccaggccggctcgttcctcggtgttttcgacggcctcttccgctacatctcccaagtcacccggcttcgagaccgcatccgccagcgctttagcgagggctacgagcctgccgtcgactaccacgatcctgtcggacgccgtgatgatcgactcctctaccggcaatcgacatgggtctatctctaccgaacgatccgaccttcgcggccgagcgagaaaattgcacaggtcgttgacgacggtctcgagtacctggatctgcttccgcaagacgcaggcgcattcagtatcgtcctcatgccgcttttcttgcttggctgctcggcgttcctaccccgacagcgagaacgtattcaaaagggattcgaggctctcaaggcgtactcgaatctgaggaatatcgagcctgcgtttaaagtcgttcagcgcgtttgggaggttatggatacgaggaccgaggatagttgggactgggagaggattatcaaggagatgaatatggatttcctgattacttga

SEQ ID NO: 27486 - DNA, 1164 bp, Emericella nidulans
gccacctctgcgccccagaccccgattcgccgccgctcgaccgacctcacgagccccccgagcccccccggcctgacaccgaccatcgtcaatgcaaagtcaaagaggagacaccaccgcaatcagcgacgggagcgggagcgtgtgctgcaggccagcctgatgacggctctgcctcagcgccctgctccctcggacggcgtggatgagcttgcgatcgcaaagcccgcagcggacaccgacaactcccacaacaacaacaacaacaacaacaacaacaacaacaacaacaacaacaacaacaacaacaacaacaacaacaacaacaacaacaccgacaccaacagcaacaacagccaggacgcggacagcgacgcggacagcgaccacaacagcaacggtgaccagaatcagcagaagcctattattgagactactgatgatcacaatgcagatgaccagcacatcgacaccgtcagtgacagcgatgaacccagctccccaatcatgggcattggcctccgccccatcagcaagcctgtgtctgttgttgtcgacaacactcgaagaaagcgtcgcgcccgatccctcgtcgcaagcgaggacgacgatgtcgcagccccgtcgacacgccagaaacgcgcccgcgcgaacaaatacctgacaaggaagcgttgcactcggtgcgctgaagggaataaaaagtgtattcccctccccgcaagcctggtccgacgggctttgtccctggcgcggatgccccggacgaaggaggccgcccatcaaaccctcaagttccgtttcgacatcgatgccgagctgcagaaggccaacaaacagaaggtaagggtcattgcagggggtggatgtggtcgtggcgctgtgcttgaaacataccagttctggcgccaggtacagctgtcagtgctgtaccacacctttcagctgcggaatgagatccgctcgctcaagaacttcgctccagtcccagcatctgagatgctggtgggcctggacgagttcgacaacgccctggctgccggtgctgacaatgatcttgacttcctggaggaggacgacgatgacaaccacaatgtggaggaggatgacgacgatgataataacaataacaacgacagagacagcaatgatgatgatgagtga

SEQ ID NO: 27487 - DNA, 768 bp, Emericella nidulans
accttcgtctacgaggccgacaagatcgaagagtacttcgaagcctggaatcaactcgaggacaccattgccgaccccggcctggttatcctgaacgggtactaccgcaacttacccgaaatcaatgcggagaagcctgtcctcgtcatggagctcatctaccagggttacgacaccgcagcccctcagtatattgaggcctaccgtgctatcggcccaatccatgagacgactgttaccgatatctactggaacaaactctttgatatcacaacttcggtcgtaacgaccgggtctgtgtccaagccagaattgggccggctatgtcaactccgtcgtccgctgggaccccgcgtccatgcgcgagactatgagattttcgctgaccttgtcgccatcgaaacttacaacacctctacattcattttcgagtcatatggacggaagggtgtccgcgactttcccgacaatttcaacgctgtcccgccggaggaacggaataagcacaatatgttggctgccttcctgttctggtccggcgatgacgagaccgagctcgccgttgcccgtgagttcggagagaggctgcaaattgccagccgcaacggtgagatcgctcactcttacgtcaactacgccataggcggcgaggagcttccacaggtctacggccgcgacgttgaccgccttgagaagctccagatgatcaagaccaagtttgatccttacaacaagtttgggttttatgcgtccctcgcaagcgcctga

SEQ ID NO: 27488 - DNA, 1272 bp, Emericella nidulans
gcgcgccagaaacaagcagcgcccatccaacgcgccacgtcctcggagctgatgcatatgcttccagacgatttacctcaaaaacaccacaatggtgcaaatatgggcctcgcaaacaaagatacaactcgtgataaggtgcacgaagcggcagatgctccgggcttgtggcaactcgcgttctgtgttgcgggaatctatgcttcttttctttcctggggtgttcttcaagaagcgattacgaccgtctcgtatcccgtgcatcctcctaccgcagctgagccagagccagaaaaagagcgctttacgttctcgatagtcctgaacaccatccagtccaccttcgccgcagtcaccggttttctgtacctctacttctctactcccaaaggcgaaaaggttccatccatcttcccaacgcgcaagatcatatttccccttgtcctcgtcagcatctcctcttccctcgcgtcaccatttggatatgcaagtcttgcgcacatcgactatctcaccttcatccttgccaaatcatgcaagctcctcccagtcatgttcctccacctgaccatctttcgcaaacgctaccctctgtacaagtacggcgttgtcctcctggtcacactcggcgttgcgactttcacactacaccatcctggaacaagcaataaggctgctgcgtccgcgacgaagggcacctccggttcttcggcatggggaatttttttgctttccatcaacctgctgcttgatggactcacaaacaccacgcaggaccacgtcttcagctccccgcagctttacacccgcttctcggggccacagatgatggttgcccagaatgtgctttccaccctgctgacctcagcctacctcttgattatgccccacctctcctcaacaggcattctccacgctatcctccctgttcccatcccgccttcaacggagaccgagttgacagcagccgtgtcattcttatcccggcatcccgaggtactcaagagcgtgcttgggtttgcggctttcggtgccatgggacaacttttcattttttacaccctatctcaattctcgtctctgctcttggttacagtgacagttacccgaaagatgctaaccatgcttctgagtgtcttttggttcggccactctctgtctgctggacaatggcttggtatcggtcttgtctttggcggaattggtgctgaggctgtcgttcagcggcaggagaagaaggccaaagcggcgaaggcaaagaagacggagtga

SEQ ID NO: 27489 - DNA, 1023 bp, Emericella nidulans
gctgacccaacgcttctcacgataaaagttcaccaccacggcaacacccacccgatcaccctccccaaagacgcaaccctccaagacctcgcgacaatcctcgcctcaaactttcacatccctattgagaatcagaagcttcttatcgcgccaaaaccaggcatgctgaaagcgccctttacatcaacttacctatcagagctcctcccgcttgactctcccaaactgaagattacgctcctcggcaccccagcaaaggagatagaaagcctaaacatccaagctgccgagacgcgccgaagagacgagagacgagccgctgctcaagctgaagctcgggcgcacagtcgcatttcacctccaacccgttcaggcggcattcacaccctctcctccaccagtgccagcaacaactacactttccacacccttaagccacttccctaccttcctaaccccgcccgcagcctccaattcctcacacgcctacgtgacgatccaggcattaggtccgcaatggcaaaacatcgcttctccgtgccgctcttgacagaaatggaccccgctgaacacacaacctccgaatcgcgcacgctcggcctaaaccgcaacaaaggcgaggttattgagctgcgtctccgcacagatgcttacgacgggtaccgcgattatcggacgataagacgtacgctgtgccatgagcttgcgcactgtgtgtttagcgaccatgatcgcgatttctgggacctcactaagcaaatagagggggaggtggagaggggcgattataggagcgggggaaggatggcagggggagacgagttctataatcccagtgattgggaggtggaaagagaaggcggccatgttgtagatgggggtggtgttgtggggagttcgcaggtccttgggggtaacagtcaggttggtgctagtggtgggggcatgagggaggttcttgcgagggcggcggaggaaagggctaggagggcgaaggaggagaagagggatggttcttcctga

SEQ ID NO: 27490 - DNA, 837 bp, Emericella nidulans
tatgttttgggatacctacctcgtgatggccgagtttacgttgcagacaaggacgtcaatgccgtctcgtttgctctgtctctcagcatggttgagtaccagactgtcgtgctccgtggagacatggaactcgcagcggagctgctccaggacatcccacaggaccagatgaacaaggtggcacggttcctcgaaggtcagggatacaaggaattagccctggaggttgcaaccgatcaagagcaccgctttgagctcgcccttgccctcaacaacctcgacattgcccttgaaatcgctcgtgctgctaatgcggaacacaagtggaaggtcgttggtgatgctgctttgtcagcctggaatttgtccctggcacaggaatgtttcatttccgccaaagatgttggctctcttctgctactgcatactgctagtggcaacagagaaggcctacaagcgctggcgtcgcaagcctctgatgctggccttcacaatgtcgcgttctctaccctctggtcgctcggagatgtcgatggttgtatcgacctcctcgtccaaaccaaccgtttagctgaatctgttctcttcgcccagacatacaagccgtcccgagccccggagcttgtggtcaggtggaaggagtcgttggaacaatctggaaaggccaagatctctcggctcatcggtgtcccacctggcgcaccaggcgtgccggcggatgatgacttgttccctgagtgggaagacatcatcggctcccttatcgacgttgatggggaggacgctgaacctgaaccagagacgaacggcacgcaggaggtggagacggaggcatga

SEQ ID NO: 27491 - DNA, 1329 bp, Emericella nidulans
ccggctgctgcctcgacctcccgcggcaacggtcgctctagtggctctggcaacccaaagttgcttgtcgtcctcaaactgccttccagtctattgaaggacttcgtgcccatcatagacagcaaagacaactgcgtgacgtggaccgctaatccgacaactaaggcgtctgactgcgccatatctgtccgtttcaacttcttgtctaccgacttcagccactccaagggtgtgaaaggtattccggtcagattgtgcgcgaagacggaaatggtggctggtggctccactggagagtccagcaatgaagcagaagtatgtttctgcaaagtcaagctttttcgtgaccacggagccgagcggaagctatccaatgatgttgcccacgtcaaaaagacgatcgagaagctgcggcaacagattcagcagtccgagatgggtgctggcaattttggcaagcgcaagcgtagcagtgccgctgtcggtttcaagagctcggaggcacgccccgcaaagctatttaagcataagcgcacgttatccatgagctcgcaggatggcgccggtaagatgagcgttgcagatgacctgcatgagaagcttgcgttgctgcaggacatgttctcatccaccaggcccgtcagcgttttcagtctacgaggcgacgaacaggacgatcctgatttgtacccagtgcagctcccagaatcacgagatttcatcaaaaaggaatttcgcggcgcccgtcatatcagtcttgatcgagctgctttgcaagaagtttcgcccaccagcagtcacatgtctatcagctcgccttgcaacccaatgcaggcaagtgtattctacgattccgagtactcacggcagtcatccgaggttccggacaactctgggtttctgaaacacccagtgaaagtccagaagatcccttcagggaatggcggcacacccactggctacattgaggcggttgatattgatccaacatatcgaccgcccgctgaacgacgacccagaccgattgcatgcttctatgttcgtttcccgcggaacggccagagccaggatgattactaccgcgcggtgtatctcaccgagcgtacagtgcgtgacttgatggagaagatctccatgaaacagcggatagatcctcaacgcatcatccgtgtgcttctcgttaaggaaaatggactcaggatcatggttgacgatgatgttgttcgcgaactccctgacggacaggacatggttgctgagatttccgaaacggcggcgtacgatgcatcagatacgccttctccagtcgaggtgaaactgagatactaa

SEQ ID NO: 27492 - DNA, 534 bp, Emericella nidulans
cgtttctcttctctattcggcggtctcctgcttgccggggctgcgatcgcccaaaacacaagctgttctcccaagtcctctgacgccgaagtcattgaatacgcgtacgcattgcaaggactgctcgagagatactatacatcccagccgatcaaccagaccttcctgagggatgccaccaatggctcgagagtggagtactaccagaacctcctcggcatccagagacagaaccgtttgggcgtccgcgctttacagcaagtcggctctcaaatccccggcttctcgaacccaagatgtgactactcgatcccgaatgcaactagcggagaagattacgtgaagaatgctgctgtactcgagggcagcgttgccagtgccttcattggtgccactgggtacacccagtccccggaagtctcgtttattcttgcgagactggcagccgtgcatactgcagacgccagctggcttgcggcagagaagaaaagcgttgtattcccgtccaacgtttcctccttggtgcccgcgtag

SEQ ID NO: 27493 - DNA, 852 bp, Emericella nidulans
catcgggcagaacttctcggtatctccatcaacggcggcctcaacgaccaggactccacggccgacagcggcgaggcgaacctcgacctgcagtacatcatcggcgtctcgtcgccgctacctgtgaccgagttcacaaccggtggccgcggcaagctcattcctgacctctcctcccccgacccgaatgacaacaccaacgagcctttccttgacttccttgaggccgtcctcaagctcgatcagaaagacctgccccaggtcatctcgacctcctacggcgaggacgagcagacaatccctgagccgtacgcccgctccgtctgcaacctgtacgctcagctcggttcccgcggcgtcggcgggttctccgactactgggcgcgcccggcgtaccagaacgccgcggttgagtcatacctgcgcaaactcggtagcacacaggcgcagtacttcaaccgcagcggacgcgccttcccggacgtcgcagcgcaggcgcagaacttcgctgtcgtcgacaagggccgtgtcggtctcttcgacggaacgagctgcagttcgcctgtatttgcgggcatcgtggcgttgctcaacgacgtgcgtctgaaggcaggcctgcccgtgctgggattcctcaacccttggctctaccaggatggcctgaacgggctcaacgatatcgtggatggagggagcaccggctgcgacgggaacaaccggtttaacggatcgccaaatgggagccccgtaatcccgtatgcgggttggaacgcgacggaggggtgggatcctgtgacggggctgggaacgccggatttcgcgaagctgaaagcgctcgtgcttgatgcttag

SEQ ID NO: 27494 - DNA, 798 bp, Emericella nidulans
tccgccgtccagctcaagttcaacttgcgcacctcgtccaacgtcaagaccgtgcatctgcttggttcctgggacaactactctcgccagatccccttgtctcgcgactcgtccaagcccggctcctgggtgggcaaattccgcttccagacctcgatgctgaagcttggtggtcggtactggtactactacatcctcgacggctaccacgtctcgcacgacccggcagcagactacaccgtcgagccaacaaccaaccgcaagctcaacatcctcgatgtccccggaggcaaagagtccagcacgtccgcgcgccgtccccgccgtggctcctcagatatcgcgaccggccgcgccctctcgccctcaaagatccaccaccctaagccttccaagccgtacgcgtcgcgccagatccgcgaggccgactttgccccgacccacgccatggatgagctttctcgccgctttgggtcgtcccgcctctcggacgacggttacagcgacctgtccaactcgccgccttcctctgtcggttcgtcgttgtcttctcgcagcagcggaagcacctcgcccagctcgctgtccagcatgtccgatccgccttcagtttgccattgtgagcggtacgggatcacccgcaagggagaccgcgtcaagctcgattgcggcggttcccggtgtggatacctctatgagacttggggcgattcctgctccgaggacagcgacagcgatgaggagtaccgccgggctcgtcggggcgtgaggcgccagggtatcgttgtccgccggtag

SEQ ID NO: 27495 - DNA, 441 bp, Emericella nidulans
gttgctgccaaccatattctgtacgagaaggatgagcaccctgaccactgcgttgtgatcaagtacatgcctggagttggtgacaacaagcgtgctttggacgagtactacgccgagatcttcatgggcggccaccagaccatcagcttgttcaacatctgcgaggattcgcttctcgcctctcctttgatcatcgacttggttgtgcttgccgagatgatgacccgcatcacctggaaggctgatgatgctgccgagtacaagggattccacagtgttctcagcgttctcagctacatgctcaaggctcccttgacccctcctggtactccggttgtcaactccttggcaaagcagcgcagcgctttgaccaacatcttccgcgcctgcgttggattgcagcccgagtctgacatgactcttgagcacaagctgttctag

SEQ ID NO: 27496 - DNA, 2508 bp, Emericella nidulans
gcgacaaagcgaaagagcgtaaggagtgaagccacgagaaacgatctgctgtggaccaaggctactccggaaaatcttcaggcatttgctgcgaaaggtgacattatgggtgtcgcgaatattcttaacgtaggacaaaaggcagacccagagtcgatgatagctgctgctaaaggtggccatgatgaggtattgtcccttcttcttggtatgggcgacgcggatcctgatcccgccccaatatcttctatgaagaccggacataacactccgatgcttgccgcaattggtcgtggaaatctcgctgttatcaagctttttctggatcagaaaggcttcaacccaactcgccgactttgtgatggcatgacctattatgagctatctaggaagcgcagggcagacaattgggaggaagaatatgatacactcaaagaggcatacgacaaatatatcaagaacaaaaagcaacgcagatctgatcacctatcaccgcgtcgaacacgagataaggagaaggatagcaagcgctctacccgcagggagtctccttcgcccgctaggtcaaggcaaaacggtagtcccggcccgcgtgataaggactcagcagccatgccaagagaaaagaaggggattgctcaaccgagggataaggcaggttccggcatacatcgtccgaagcatctacatcaagacatggatacggtccggtccgaaccgtccaggcagaaggcggtgtcgacggttaaggatagcgatccgaacaggggcgaagacgtaatcaagagaagacgcctcatcgcgggacgaccgccccaggatagggagcgcaaggtgcctagtttaccctcatcagattcaacgtccagccgtgaggacggtgtcaaacctcgtccggaccgttcttctgagccgacgtctaaaacttcacaacttaagcgaggacgtagcagcgctagccctgagcgacctcgttctcgcgggactggggctgatagtaataaccgtgatatgctgaagaagaagagaagagttttgtccgaggaaggggcgccgaatgttactaatggagctttaaagggacattacactgtcgcagttgatgatgtcaagtcgcctcctcgacaaaagcttggcatcagcgccagtgattccaaaagtgatcgttcgcaggattcacgttttgtgtcccctaaggaacaaaacttggtaaaagaagagcgggaaaaacaggaaacgcacggattggttggtattcctatggaagaggccaaggtagttgaagtggacaaagaatctcccccgccgatacatcaagtgcttgatcgaagcgaacctaatggcgataccgagaccgaaatccctcctagccaggattctgagaaaaagatggccaaggaaacagagcaggagcggctagctcaagaagcccgggctgccgacgcggaaaaggctcgcgcgcaggaagaagaggaacgagcagcccgagcggcctgtatagcgctggaaaaggaggaagaaaataagcggaaagaagctgagcagcggcgaattaagcaagcagaggacgagcatcagaagcgcctcgaacaggaaaggcagcggcttgcgaaaattcggagggagcaggaagcgcacgagcaacgtcgtcgagatgcacttcccagtcgcctttgtatagcagctaatcttgtcggatccaacaacccgcaatcacgcagccacacatggttgaagaaattcatgccagtggttacagcggagaccagacagcttgatcctagctgtagtgcagacgttgcaaatgagcgatgggttccaaactatctcgttgctccgctgctagctaccaacgacctccagttgtcccagtattccagttgggagaagcgccacgtaacacctacgcaaaggatgaatttgtggcgggttacacggcgaatgctcgtgcaggcggacgatacggagttcttgacagcatcgtttgggcagatcatgcagaaggatagtgaaactcggagcaagtactttgatatggatcatgtcttctgggtaaagtcggacggagaagagacccaatccaacccccccgtcgccgctgaggaggtcgaggttcctgccgagtctggcgccggcggtcagatgtctgtcctcgatgctctcaagggtgtccttcgcattgccctgatccacgacggtcttgcccgtggtctccgcgaggccgctaaggccctcgaccgccgtcaggcccacatgtgtgttctcaacgagggctgcgaggaggaggcctacaagaagctcgttgtcgctctctgctctgagcacaagatccctctcatcaaggttcccgatggaaagatgctcggcgagtgggttggcctctgccagcttgaccgtgagggtaacgcgcgcaaggttgtcaactgctcttgcgttgttgttaaggactggggtgaggagagccaggagcgttctgttctcctcaactacttccagactgagcagtaa

SEQ ID NO: 27497 - DNA, 876 bp, Emericella nidulans
ctgagacacgacaaaaccagtctatcgaagctcaccctcgtcggcgagcccgccaaaatcccgggcgatttccccaacactgttgctgtatcggtgaaaggccgtctagtttgtgttggaacaacgggaactatggccggtgtatcttgcacgacgtatgacaagcatggtctagggagtttcgacgacctacgcccgttcgagcttggccagagtacgccgccagttgggccagcaaatactgtatctcaggtcctcttctctgccgatgaatctgtcctctatgccacggttaagggggacggaactgcgaacaatacgggccatctctccgttttcccagttctttatggcgattcgcctgagacacctcctaccctgtcaagggaagacacccggagctcgcccaacggcaccggtcttctcttcggctcggccatcatcccctcgtcggacactatccttgtgacggatcctggatttggggctgcggttttgtccgtcaacaggtcgactcacgaagccgggttagtggccaagactataattcccggccaaacagcgacctgctgggcagcgtactcagccgagacaaacagtatcttcgtaacggatgttgctgtcaaccggcttgtcgagctggatgctgtcgatgcgagaattttgcgaattaccagtctatttaaccatgatcctggtctcgtggatctcgtcgtcgtggacaggcttgtttatgcgctgtctcctggaaatggcactacggatgcagctatcacggtctttgatattgaaaagaaccagcaggttcagcactattctctgaaagcgcttggtgtgggaccggctgcgatgggcatggcttatctcgagctatga

SEQ ID NO: 27498 - DNA, 513 bp, Emericella nidulans
aaagcccttgagcgtgagcgccaacaagctgtcgagaacttggagaaaaacgttacagaccacgaccgggagaccggcttgttgaatgtccgtattgcggaactcaacacagcactggaagcagccaagacagaagctgagaaactcaatcgctacaatgcaggtctcaaagagcaaatgcgactggagattgaagcaaaggatggcctgttggataaatggttcgcggaacagacacgggcgttcgcatcgatgaaggctgcagtcaacgctgagcgtcgccaggctaaggtacggagcgccaattgggagctaaagtcagatgaactggagtcggatgataagggcattggcagcgagccaattacccctgtcagcatgacccggtttatggacgtagagattggtcgaggaaagcatcgcaggcggattgacagtggaattggagttctcactgaagatgagctggaagatgaagtggacgcagtaccctctgacccgatcgatctttga

SEQ ID NO: 27499 - DNA, 1116 bp, Emericella nidulans
gatcagggtataactgtttttcgcaagaatgaatcagacctccagaggcaaacggaagcagcggtcaacaagaaacccaagcgcggtccgctcaataccatcgagcaggccgctctgatcaaggtctgcgagaagagagccagatacgatgaggtttgcaacataacttcttcacaattctggttcggaatcgagatggctctcgaaagagagattggtcgtcgctactcgcactattcctgcagaaaacgcatcaacgactacatcacaaatcgtgctatatatcaaaacgacatcaagaacgggataaaaccggatcctgtgcttctgcccgacccagagatccgcaagctgctagatcgatgggaggaaatggacaaatacaaggaacagctggaaagagagaaggcattaggtcagcttgtgggacgggagcctgaagtgccgacgaaaaacaaactacagagagtcgcggactgggtcaggagccttccagacccggagcctcaagctagacccctcgtcactccgccctccaccaactcctcccaatcgccagtcaaacaggatgaatccactgttctttgggctcgatatcgcaaaattgaagattatcgggccattgcacggtctaatcaactccgtgcgttgaacaatgatttaacgagcagtcgacagcttctatcgaatatcaaagaacaattacactcgacactctacgatccgccggccaaccaaacaacgacaggtctaaagcgaactcgggaagacgaggtctctcctgaccgagcagcgccacgtcctcgaatcgaattggccgaattggaggctatggtcaagccaccattgaaacagagtcctggtaactcgaatgtccttactcaatccgaaattgctgcccgccagatgccgattgagacggtattcagcaaattctgggaaagcatgctgccatatttcaaggaacgagctctgaaagatggcatatccctcataaagtctgagtctatcatgcacgacctatttaaagaagttggggccgccatgaccaaggcatttatgaaactagagcagcaaacctctcgatctccttccgcttacaagcctcctatataa

SEQ ID NO: 27500 - DNA, 1110 bp, Emericella nidulans
gctgcagtcgaaatcaagacaccggtagtcacccagaccgcgcttccgatccacgtacacgatccagctcaagtcccagcttcgagtccggctgtgtcaatcgagacgaacagtaaaagtacaaccagaccagcattccagattgaagaacaccctatcgaccaagtccgaccgatcaaggtcgggggagggacgtggtttgagaatacataccctggtgtgaggtgcgatatcccagcgcacgtctaccagtcgaatttcgagccaaacaccaagtggacggaggagtttgcacaaggacacgagatcagagagtactggcagggtgttgcgcgcaaatacaatgtctaccagtacgttcgggcgcagcatagagtcgaaagggccgagtggtttggcgacaagggtaagtggaaggtcactgtacgcgatttgaaggaggacaagggccagctctacgaagaagaactcgacatcctcctgaatgccatcggccacttcaacgcctggaaactccctgactacccgggcattaacaccttcaaagggcctctcttccactcgtctaactgggaccactctgtagacctcaagggtaaacgcgtggccctgattggaaacggcgcatcggggctgcaagttctcccctccatccaacccatcgccgcccacgtcgaccactacgcgcgcaaccgcacctggatcgccgactcgtttggatctgtgggcgtacggcgcctcgaaccaaatatcattccgcaggagcaaatcgactccttcaatgacccggacacgtacctgaagtaccgcaagtccatcgagcagggctatttcagtcggtttggagcgatcttccgcaactcgcccattaacatcaacttgcgcgagacatggacaaagctcatgctctcgcgaatcaaagacaagccagagctggccgataagatcatccctgacttcccgcccaactgccgccgtcccactccggggccgggctatctggacgcgctgacgaagaacaacgtcgagtacatccagacgcacatctcccacttcacagagaccggcatcgtcacaaaagacgggtcgaacgctccgttgacgtggtga

SEQ ID NO: 27501 - DNA, 456 bp, Emericella nidulans
tcttttcacctgcacccgacctccatccggggggcatacaacgcccacccagacggtctcgtcctcgtcacggatgccatgaaactctgcggccctcctgatggcatctacgactggacaaacggcgagcgcatcgtcaagaccggcgcgcgcctgacccttgaaggctctgacaagatcgccggaagctccgctacgcttattgagtgcgtcaacaacttccgccgatggtccggcgcgtccacggcgcaggctttgaatgcggcctcggctgtgccggcacggcttcttgggcttcagggcgtcaaggggtcattggatagtggcgctgacgcagatctccttgttctcagtgatgaggatgatccttactctggaaagacgttaaaggtaaaccaagtctggaagcgggggacgaagatttatgattccagcaaagacactggtcagatttga

SEQ ID NO: 27502 - DNA, 1650 bp, Emericella nidulans
aagagcagatgggtcggtcagcccactgacgtcgccatcttagatctgcttgatgcttttggggaggacgacgtgcgggaccgcataagtgcccgggttgcagaaactcccttcagttctgagcgcaaatggatgggcgtagttattggcagtggtgttcctggcgattcaactgctccaataggtggacctagcatggcctacatcaaaggcgccttggaacaggtgctggcgcgttgtgatacttaccttaccaaggatggccaggaggttatattggacgagcgtcggcggcaggtcgtgcgacaggctgcggaacaaatggcatcagaaggacttagggtcctgtcttttgctagtggtgcagtaagagagtctagaggaagggcactcggtagtagatccggtacgccttcttcgaaggttagctccggcgatgaggacgatcgctacagcggcttggtctttgcagggttggtaggcatgaacgaccctcctcgcaaggacgtgcacaaggcaatccgccgcctgatggccggcggcgtacgggttatcatgattacgggcgatgccgaaaccacggctgttgccattgcgaagaagctcgggatgcctatcgtggagactcctggagtacgaaatgtcctctgcgggcaggaaattgaccgcatgggcacatctgaattatctcaggcgttatcgtcagtctcgatatttgctcgcacaagtcccgaccataaaatgaagattgtgcgtgccttgcagtcccgcggtgatgtcgtcgcgatgacaggagacggcgtgaacgatgcacccgcattgaagaaggccgacattggaatcgcaatgggcaagcttggcacggacgttgccaaagaagcagccgacatgattctcacggacgacgatttttcgaccatcctgcgagccatcgagcagggcaaaggaatcttctacaacatccagaactttatcacgttccaactcagtaccagtgttgccgctctgagtctagttttgctgagcaccatgttcggattcaagaacccgctaaacgcgatgcagattctgtggattaatatcctcatggatggtccgccggcgcagtccctcggagtagagccagtagacccttcgatcatgggccggcctccccgacccaagagcgctcgagtgctcacgaaaccgcttatccaacgggtcctcacctcagcgtttatgattatgatgggcactttggccatatacatctatgagatgggcgatgatgacgacgtactgacgggaaagcgctcccgagtagtgacggcccacgacaccaccatgacattcacgtgcttcgtcctgttcgacatgttcaacgcattgacatgtcgcagcgaaggcaaatccgttcttcggggcgagatctctctttttgggaacaagatgttcaactatgccgtgctgggctcgcttgccggccaggcttgtgtcatttacctaccgttcttgcagcgggtgttccaaacggaaccactaaacgcagcgcacctgttcaagctggtgtgcattgccagcacggtgttttgggttgacgaggggaggaagtactaccaatcgctgcagcgacggcgggcagttggggtaggatatagcgtgaatgtgtaa

SEQ ID NO: 27503 - DNA, 909 bp, Emericella nidulans
tacgtcagtcgccttttgctctttctggcccctttgctggtcaagggtcagctctctggcagcgtcggtcctcttacatcggtcagctccaagagccaaaccaagacctgcaatgtcctcgattacggcgccgtagcggacaagtctacggatattggccctgccttgtcatccgcctgggatgaatgtgccgacggtggggttgtctacatccctcctggcgactacgcgattgagacatgggtcaaactgtctggtggaaaggcctgtgccatccagctcgacggtatcatctaccgcaccggcaccgacggcgggaacatgattatgatcgaacacacctcggacttcgagttcttcagcagcacctccaagggcgcattccagggctacggatacgagttccatgccaagggctcgtcggacggaccacggattctcagactctacgacgtgtcggacttttccgtgcatgatgtcgccctcgttgattcgccgctcttccacttctccatggacacctgctccaacggagaggtatacaacatggccatccgcggtggcaatatgggcggcctggatggaattgacgtttggagcacaaacgtctggatccacgacgtcgaggtgacaaacaaagacgaatgcgtcaccgttaaggtagaacatagtcccttcgacgcccggtctgatcgcttgcagagcccctccaagaacatcctcgtcgagaacatatactgcaactggagtggaggctgtgccatgggctccctaggcaccgacactgatatttctgacattgtgtaccggaacgtctacacctggaaatcgaaccagatgtatatggtcaagagcaacgggggcagcgggaccgtgtccaaccttgtgctggagaacttcatcctttag

SEQ ID NO: 27504 - DNA, 1185 bp, Emericella nidulans
gtgcatcgtgctttaaagttcgcgacaagtgacccacagggtccggtgtatcttgttggtgcacgagaggtcatggaggaggaaatcgagccatatgctgttagtccgtacgggtggagaggtgttgcgccgccggcgctccctgctgagggggtggagcttattgcgcaggaacttgcatctgcgaaggagccgttggtcattgttggatactcggggcgtactgcgcggggagtggagcagcttgtcaagcttgcagacacatacaaaggcattcgggtgctagatacgggtggtagtgatatgtgttttcctgctgaccatccagcatccctggggatgcggttcgggatccacgaagccatcaagacagcggactttatcctcgtcgcagactgtgacgtcccctggatcccgactcagtgcagtccctcagactcggcaaagatcatccacgtcgacgtcgacccgctcaagcagcagatgcccgtcttctatatcccggccatggcagtcttccgcgccgagtccgccaccgcattcgagcaggtaaacgcatatgtcgagtctaacacagagctcaaacaattcatcgcctccgacgcaaacactgtcctcggccaaagccgcgaggaagcattccgcacaacccgccaagccatcaacgagctggcagtcacaccagcgggcgggcccgacgcagcccttaacgcctcgtacctcctctccgaaatccgcaagaccctaccgcttgacacaatctgggccgtagaatccgtaaccctcacgcccattgtcgcagaccaaatcgcagctacactacccaacagctggattaactgcggcggcggggggctaggctggcggtacaatatccccgtgttgacgattgtgctgaacaacaaagggtggaatgcgccgagacgaagcatgctgcttgtgcacccaaatggggacgggtcgaaggcgacgaatgaggaactgaatatcagctttgcgcccacgccagattatgctgggattgcgagggctgcgtcaggggggcatatttgggccggtgttgcgggcagtgtgggcgagttggggaggttgttgccagaggctgtggagagtgtgaagaacggggttggggcggtgttggaggcgcagttggatgggactgagggaaagtatgttaggaagtag

SEQ ID NO: 27505 - DNA, 363 bp, Emericella nidulans
caactcaccaagaccctcagcctgcttgccgcatcgctctctgtcctcctcgcgcctgtcaccgcggcgcccgctcccggcaccagctgccacgttggcgccagctggcccgaccaccacgactgccacaagttcttcgagtgcgctgcgggcggccatcccgtgcgcaagacctgcggccccggcaccgcgtatagtcccgagatcggcgtttgcgattatgagtggaaggtccgttcttgccgggctcattcctggacccacggtgccgaggaaggtgcttctggttcacattctgggtgggacaagtcgaagaacgagaagggccatgagggtcattggtctggcgctgggcgtcactga

SEQ ID NO: 27506 - DNA, 915 bp, Emericella nidulans
tccctaaatccctcctccaaacccgtcctcgccgtcatcggcgttggtcccgggatcggcgaagcggtctcccaccatttcgcgtccaaaggcttcgtcgtcgcgctgatcgcccgaacagaatccaagttggagaaggtccaaaaaaccatcaatgacgacgtcggcacgaccgcatcaaagtactacgtggccgatgcccgctctgaatcgtcgcttcaatccgcttttgccgcgataaaggccgaccttggccccgtcgacgtgctaatctacaacgccggctcgagacgcttcaccccgcgcaacattctcgaaacctccagtgaagaattcgagaatttcacgcgcatcaaccttttcggcgccttcttcgcgacaaaatgcgttctgcctgatatgctggccaaatccagcggaacgatcatcttcacgggcgcaacggggtcgatccgcggcaatgcgggcgtctcgtcattttcaccaggcaagtttggactccggtcgttatcgcaaatcatcgcgcgcgagtttcagagtagcggtatccatgctgcgcatttgattgttgatgggcccgtcgagagtgacattgttggtgggtttgtgaggaggcggtgggagcgagagggggagcagggacggaagaaggtggaagaaaaggatctgtatctgatgcagccaaaggaattggcggagatttattggtttttatatagccagccgaggagcacgtggacgcaggagctggatgccgccaaattgtcgacagcgtttgcgccaaccagctcgcctcctggagaacagcggggaagtgaacaggcaccccttttccatttgactggtgctcctcttcttcgccccataaggccagcctatcggtcgatcgcgtcatcgactagtctgctccaataa

SEQ ID NO: 27507 - DNA, 636 bp, Emericella nidulans
tcttccctttactctgactgctccgccatgtcatttaggacgaaggccagatacatcgaagccacagtggcgtcctcaacagcctcctttgcagcctcaaacgcagcaaccaattacgctacggcaacaacatatatccggacagcgctggaagcaattgcaaagactgcaaccggccggatggatgccgaatcctgtgcggctgtcctaggaggttgccttgttggagcggaaaccgctgcgtcagaggccgcaaaggcagcagagaatgcgcgcgcggctgccgtgatcgccgaagaggctgcctcggctgctaccgaaattgcctatatcaatgtatctggatgggctttaaatgaaagtttctccgcgggtactgacaatattagtgtcctcgatgatgaggagttcgagacggatagcgtgcttgcggaatggaccgctctcaaggctgactgggccaaatatcctggagaagaagaggttgaagatgaggataatgagtacgatactccgtgtagtacagggagctacgcatctctttacacgcttgcccacgacgaaacaatcaaggcgcagcaccccggctttatcgtcattggagcctctgcgaaaccttctttctccaaagattaa

SEQ ID NO: 27508 - DNA, 477 bp, Emericella nidulans
catctcgcaacggacggatacggtactatcggagacagcggcgtcgatgatgacggcgaagcgcactcgaccgcgctaatcaatgccaatgcgaatggtaatcagaaacagaagagaaagtcaaagaagaagggcaagaagaaggctgcaaagcaatcttctcctcctagagtcccgctgtctcagctcttcctgcagggcaagtaccctatcggcgaggtccaggagtaccagcccaatgtggaaaacacctcacgcaccacggccgaggaagtacgctacaagtctcgcagtcatctcgaggatgattcgtttttaaacgactatcgaaaggctgcggaggtccaccgccaggtccgaaagtgcacgcaggagcgtgtcaaaccccgccagggtctaatggaaatcgccgaggataacaacgatggcgtgcgtgcactcctagagccacgctggtcatccccgccgaagccttaa

SEQ ID NO: 27509 - DNA, 729 bp, Emericella nidulans
aatgttgaggaaccgaccaccgcaaaccctgatgctgagtcggagacttcttccgcttcaccagacgcctcttctgaactccgcgacggactcagctctgcagagaccaccccgccgccgatggatgaagacaacagtgatgacgacatgtcgatcgagcccgagaaacccttcggtgtcaacaacgcggctccgcagtactctcactccttccagtctgttcctgcgagctcgtttacagggagcgcaccgtggccttcccccggattctcgcacttccgtcattcgagcattgacgcccgtcctccaaccgccgaggccaagcttgccgatgatgacgaagcggatttggctgctgctatcggtctttgcaactttggtacaccccggatgggaccgacatcggcgtctcctggtgttccaccagtgcccccgcttccgtcccgcttcctcgaccaggctagttcttcggagaaccgcaattttggtcggtcagggtcaggggctagcgttactgataccaccctcggcaactcccaccaggacatgttcctttctttgtcctacaatccttcaatgtcgtacaaggtgtcggacgagcgcgaagctaggctagggaacacggaacgcagcagtcgtcaaacccgcaacgctgatgttgattttggcagccgccccgctcacgcggatgacgatgacgacggtgtttttggacggatggaggaataa

SEQ ID NO: 27510 - DNA, 672 bp, Emericella nidulans
gccaaggacaagtctgagagaaaggagaagcacgagaagaaggagaagcggtcagagaaggacggtgtgcacaagagcaagaaggacaagaaggataagaaagataagactgctctggccgatgcagtattgaagggacttgaagccgagactccctcaactgttcccgtcaatggtgccgatgcgaccggtgaagtcgaagcccgccccgtcggtgcgctcgtaccgtttgccaaaccactgctggaggacaaggcagccaagaaggccctcaagagtgtgaagaaggctgcggtcaacaaatgccttaagcgcggtgtgaaggaggttgtcaaggccctcaggaagtctcccgttccggctcctaatgaaaccgtcgccattcctaatggagttgtcattctcgctgccgatatctcgcctatggacgtcatttcccacattcccgttctctgtgaagaccacggcatcccgtatgtcttcgtcacatcccgagcagaactcggtaacgctgctgctacgaagcgtcccacaagtgttgcaatggttgtgccaaaatccgcggccaagggcaagaagaaggatgccaatgatgatgacgaggacttcagcaaggtttatgaggagctggtcaagctcgctcagaaggaactcacgcaggtgaacctatag

SEQ ID NO: 27511 - DNA, 453 bp, Emericella nidulans
gacgccttcgagtacaacgccaaccctggccgcgtcgtcttcggcagcggcacccttcagaaactccccgacgagatcgcacgcctggacaagaaggcgcccctaatcctctcgactccgcagcaggtcagccatgccgagcgcgtgaaggaggtcctgaagggccaggttgccgggatcttcacagaagcgactatgcacacgcccacgcatgtcacagacaaggcggtcgaatacgcaaaggcgcagaatgccgacgtcgttatttcgatcggcggtgggagcaccattggtctggggaaggctatcagtatccgcaccgggctctaccacgtctgtattccgacgacatatgcaggtagcgagatgacgcctatcttgggcgagacggcagacgggtttaagaagactggctctgatcccaagatctcccggtactgtattacgacgtga

SEQ ID NO: 27512 - DNA, 1476 bp, Emericella nidulans
ggtggtctgctttcaggcatcgaccagagtaccatttccggagcgaacttgtaccttcctaaagacctgcacttggatgcaaggcagaacagtctggtcaactcagggatgccgctgggcgctgttggtggtgctttgattctgtcgccttgcaacgagtaccttggacgaaaatggtcgattattatctcgttgattctatatactattggtgctgcgctcgaggcggggtcaattaactatggcatgatggtcgctgctcgtgttatcctcggcgtcggtgtcggtctcgagggcggtactgtccccgtctatgttgcggagaccgtcgagcgccgcattcgcggtaatctggtttcgctgtaccagttcaacatcgcgctcggagaggtcctcggatatgccatctctgccatgttcctgcgcgttcctggtaactggcggtatatccttggctcatcgcttgtcttctctactatcatgtttgttggaatgctctttctccccgagagtccccgtttcctcgtccatcaaggcaaaaccctcgacgcatacaaagtctggaagcggattcgcggtattcagaccgttgaagcccgcgacgagttcttcgtcatgacggcttccgtccgtcaggaagagaatgaggtccatgaaggcgcccacaacaagcgcttcccctggatggatttcttcaccgtcccgcgcgcccgccgctccctcatttacgccaatatcatgattatccttgggcagatgacgggtatcaatgccatcatgtactacatgagtgtgcttatgaaccaaatcggtttcaacgaggaaaatgcaaactatatgtccctcgttggtggcggctccttgttgctcggaacgatccccgccattttcctcatggagtctttcggccgccgcttttgggccattgttacgctccccggattcttcatcggtcttgttctcattggcgctagttatcaggtcgacctcaagacggaccttatgaccgtcgaagccctctatcttaccggtctcatcgtctacccaggatttttcggctgctacgcctgtctcacctgggtcggtccatcggaagtatacccaacatacctccgcagctacgggatgacaacctctgacgccctcctcttccttatgtccttcatcgtgacatacaacttcacggccatgcaagaagccatgggcaagacgggtctgagtctgggattctacggtggcattgcggccgtcggctgggtgtatcaggtgttctttatgcccgagaccaaagacaaaacgcttgaggagattgaggaggtgttttcgaggcccaccatggatattgtgcgtgagaactgggcaggtgttaaagagacgtgtgggaacttggcccgaggaaacttcaggaaagtctttgctgagcagacgaagcgacggaggagtgtgcatgagactgagttgaagggcttagcgtag

SEQ ID NO: 27513 - DNA, 717 bp, Emericella nidulans
acaataaacccggaagtcgcaacgtcaaagacatcccacctcttcacaggacagcccccccttcctcttgacggccggatgtggatgttctgcgacatcacggaccccctccttcaaggcatcctcaatccaccaaatgattcgggaaccgaccaacctccacctgggttcctaagagatgaatgtgacatagcgacagatgggtggtatgggaacggcacgatggcgaaaatgaaaaccatcatgcggcataagatcctggcaatgtatgaaggtcgcactcccgctaaggacgaagagtacgcgcccattctgagctttcccgaccatgcgagcccagaaacgggtcttaggggtttttggcttgatcccgagtttgcgacgtcgatggcgacagcgttggccactgaggtgagaagtatgattaaggcggcgcccgcgtggagggaaatggccacggcgaggacgctagcaaagaaaggggacagtgcaaaagtacagggagccaagggggctgacgaagaagaggaagacgaagagggaattgagggggaaggagaggccgcggatgagagtgaaggcgaggaagaggcgattgagcaggcggagataatggaggcggcggcgaaggctgtgcatgcggctgcaaagagggatgaagaggatgagattgaaaacgacattgacgaggtggacgaggagaatgaaatggattga

SEQ ID NO: 27514 - DNA, 528 bp, Emericella nidulans
ctggcgccggaactgaccaaggactacagctatgtctgtcttcttgccttcctgatgaacgagcagagtgccggcgaggtccgactgcagtcgtccaaccctgaagttcccttgctctttaacgccaacttcatggcgcacccgtacgatcgtcgtgtctgcgtcgaggctgttcgggaagttttggctgtgacgaaccaccctgcctttgccaaagataccgtgaacatgatccttggccccaagtccgacagcgaagaagatattttagaccactggaggaacacgatcgtctcgtcctggcatatgacggggacggtcaagatgggcaagcggggcgagcaggacgcggcggtggacaagagcttcaggctcatgggagtggacggactgagagtggcggatatgagtgtcgtccccgtcctggcaaacaaccacacccaggccacggcgtacgttacgggctcgacggcggcggacgtgttaatcaaggagtatgggctggactcgaccgtgagcaggctatga

SEQ ID NO: 27515 - DNA, 648 bp, Emericella nidulans
gccaatcttgccgttgtccacaggtctgaaggaaatgaatggcaggctcgtggtgagccaaccgacatagcgatccaggtcttcgcacaccgcttcaactggggacgtgaacgctggacgaagggcgagaagccaatctggcgtcagaaggctgagtacccctttgactcgaccgtcaagaagatgtccgtaattttcgcccgggaagatgactctgaaaagggtcgtcaaatggtttttacgaaaggtgccgtggagcgagtcatcgattcttgcacgaccattctctggacccgtaacgaagatcccatccccatgagcgaagatatcaagagccaaattctgcaaaatatggaagccctggcgaaggaaggtcttcgagtcttgtgcttggctagtcgtgaatttgatactcctatcgccaacagcgaagaagtaccccctcgcgaggaagtcgaaaaggatctcgttttctgcggcttggtcggcctctacgatccgcctaggcctgagacagctggcgccatcgaagagtgctaccgcgctggaatatctgttcacatggttactggcgatcaccctggcaccgcacgagccattgccggtcaagtcggtatcatccccgccaacatggatgggattgcgtaa

SEQ ID NO: 27516 - DNA, 612 bp, Emericella nidulans
tcttgccagattgttcgtagttgcgggaaatggagcaatggcacgccaaccgagcattcgattcaggatgcgtatgcggagattatccgccacagcgaacactttgtctatattgaaaaccagttcttcatcacagcaacgggtgataaacagaaaccggtggagaacaagattggcgctgcaattgtcgagcgtatcctccgggctgcccgcgcaggccagaagtacaaaatcatcgttgtgattccgagtgtcccgtgctttgcaggagacttgggcgatgaggctgcgctgggaactcgtgcaatcatggagttccagtacaactcgatcaaccgcggaggaaacagtatcatggagctgattgcgaaggaaggctacaatccaatggagtacatccggttctacaaccttcgcaactatgaccgtctcaagtacaccgttcccaaagccgctcctcagagcggaggctttgggcctgagcatcgccccgcctttgacacatccgcggcctatcaatcctattcattcagtcatgcaggacccaagtcaggatctgtgcagtgggatactgtgagctcgtgctacatgctcaatgggcccgacctttga

SEQ ID NO: 27517 - DNA, 1053 bp, Emericella nidulans
caacaagtcaagcgaaccaagcgagtcaagctgtctcctaatcaatttaatgtggctatgggcccgtggctaaaggccggtggcattagctatggtgtcgccatctgcagtgcattgcttacatccattgaggaccccgaggccgcaatcgatgactcggatagggagcaaggccggtctggtttcaagaagggcacgttcaatgcgacagaggatccgcgtttctacaagcctatcgacacctacgagggacttcaccgctgggacccggactttgagtggacggaggaggaggaaaggaggattgtgcgtaaggtgagcccacagctacctatggccattaaagacaatatcaaaatcataaatcaccaaaaaacaaaagagaagaaggctaagagggaccagatcgacgcgcgagtttgcacttttgcctgcgtcaccttctttgcgctgcagctcgaccggggcaatattggcaatgccctggccgacaacctcctccaagacctccatatgacgaccaacgactacaacactgggcagaccatcttcctctgctgttttctcttcgccgagctgccttcgcagctgatctccaaacgacttggccccgaccgctggatccccattcagatggtcgcgtggagtctcgtcgcggcgtgccaggcctttctcaagacccggtccggctacttagggctccgcgccctcctgggcctgctagaaggcggcttcatccctgacacaatcctctttctctcctttttctacaagtccagcgagctgcctaaacgtctgacctgtttctgggtttcgtacaccgtcaccaccatcatcggcgcgtttctcgccttcggcctcctacacatcaaggactctaacggcggcggctcgtggaggtacctctttgcgtatgagggcctactcactggagtcattggcatcatagcggccttctggatgccggcctctccgacgcagaccaagggcgggtttcgtgggaagggcggctggttcacgagcacgaggagaagattatggtcaaccgggtga

SEQ ID NO: 27518 - DNA, 957 bp, Emericella nidulans
tcaaaaatcgcctcgaccttctcgcgtaagcctgccccagccaaaccagaaccaacaactcattctcgaagattaacaaaaagaacaggcctcgtgcgcttccatcccaaatccaacccatcctcaatattgatcggcgagcccgtaaacccgagcttggatgtgggcctcgctgtgctctcgggcgccgatgtcccagttgcgctttactcggggtcttccatcctctccccgggctcaagaacagatagaaccgaatcgatcctcaaacttctttccccattatcatcaaaggaggtcggaagtatccgctgcattggtctcaactatgtgtcgcatgcggcagaaatgaaactcgatattcctactgtgccgactcttttcctcaagcccagtacgtcgcttggcgatccataccctacctcttcgacgatcctgcccaagatcacgcaggaggacggcacgggcgactatgagtccgagatggcgatcatcatcggacaagacgccaaggatgtctcggaagaagaggcgctggattacgtcctcgggtacacggctgcaaacgatatctcgagccggacgagccagatgaaccaaagccagtggtgctttagcaaaggatttgatggcgcttgtcctctggggccggtcgttgttagtaagaatgcgcttggtgaagatggtgttgccgggctgagaatcagggggatcaagaacggggttgtgatgcaggactgtccattgactgatttgatcttctctgtgccgaagctggttagctttttgtcacagggtacgacgctgcctgctgggacggtgattctgacgggcacgccgccgggcgtgggggctgcgaagaatccaaaggagtttttgagggatggtgatgagttccgggttgaacttctgccgtttgtggggacgttggtttccaagattaagaatcaggtttag

SEQ ID NO: 27519 - DNA, 384 bp, Emericella nidulans
cgcgatgcgtacaacatcttcctcagccagctcggccccgaagaccgcaacaccaaggaggcggagacatggctcgagcagctcacgcagaacgctgtctccatcgccaagcatgccaaagatatccaggcccgccgcctgcgtcgtatcaatatgggcactcggactactctaggaacccaaatccaacctcaggttggccagtcaacagccgatgtctctgcgcccagccaggcttctaactcttctatcgactcgaggaacattgatgaactgttgaagttcatcgagggtggcgacaccagctcttcgcgaaccaagcagaagaagcgtgctgctgccagcaaccctaagcttcgtgggtcgaagaagtcctctgcttga

SEQ ID NO: 27520 - DNA, 561 bp, Emericella nidulans
acagcggagtggattgagggagtacggctctgggacaaagatgctatcacacgcacctggcgcggaggctggcgcgagggaagccccggctgtggcggaacaccactggactccccgcgggccaacagatccgcacccgcacgttcaagcttcaagatcaaaccggagcgcaacgactggaggggcaggaacggccgcggcggcctcggcctgtcactgaaggaggtaatgacaacaatggtagacctcttctcagcgcagatgttcctttggggcctggttcactgcgaccctcacccgggcaacatcttcatccgccgcaagcccaacggccattccgagcttgtccttatcgaccacggtctctacatccacatggatcccgagttccgacatcaatacgcgcgcttctggaaggccctcctcactttcgacaacgccaccattaacgaaatcgtcaagggctggggtgtcaataacccggacattttcgcctcggcaactcttatgaaacatacgcgggggaactttctagcacaaggattgacgccttacaactga

SEQ ID NO: 27521 - DNA, 948 bp, Emericella nidulans
gttcttctggatccagctcatctcgacggtgtcacgcagccaattatcttttttatgcctgagagccgttcaaccattatcatggacaaggaagccaagcgcatgcgcaagtctggcgaggatcgaacgtcatatgggcccaacgagctgaagaaacctcgcgtctcgctcaaggaagcctttcatatctggatccgtccgttccatatgctgttgactgagcccatcgtcttttgcctctctctgttgtctggcttctccgacgccctcatattcacttttctcgagagttttgccattgtgtacgagcaaggatggggtttcggcatcctcgggcaggcctgggctgtgatccctatcaacctggcgtacttcctggcctacttcagctaccttccgttcttctggcgcgacagatatctgcgcacaaagatcgaaggggacgatatgccaccggaacggcgcttgaaatggctgctgtggcttgctccattggagcccatcggcctgttcgggtttgcttggacctcctttggcagagagcgcggtatcccgtggatagcgtccatgatcttctcgacttgcgtgggggtcgccaattatgccatttatctctcgactgtcgactacatggtcgcggcgtatggtgtctactcagcctctgccactggcggtaatgcgtttgcccgtgaccttctcgccggtatctcagccatgtatgcgacgcccatgtataccaatatcggtgataagtggcacgtggagtacgcatcaactgtgcttgcctgtctatcctgtctggtggtcattccaatctacgtgttctactggaagggtccccaaatccgcgcgagcagcaagtttgcccaggcgctcgaggccgagaacaagacgaatcaaggacgccgcgttagtcggatgagcagtcagggctggggctcggtctaa

SEQ ID NO: 27522 - DNA, 648 bp, Emericella nidulans
ctcatgctcgagcccattctcatcctgattactctctaccttgcactcgtgtacggaatcctctaccttttcttcgaagcctatcccgtttcgttccaagaggagcgcggctggaccaacgggggtattgctggtctcccgttcatcggaatcatgattggagtgctctgcggcgtggccctcatcgtctggcaaactaagactcgctttgcccgtaagctcgccaagcacggcagagttatccctgaagaacgtttggtccccatgatggtcgcctccgtactcctgcctggtgggcttttctggtttggatggacgtccagtccgaacgtgcactggctggcccaggtcgccgctggtgttcctatcggcgccggtatcctcgtgatcttcatgcagggcctcaactacatcattgatgtgtacatgatgtttgcaaattctgcgattgcagccaacactctgattcgaagctccctaggcggtgctttcccactcttcgcaacacagatgtatcataagctgggcgtgccatgggcgtccagtctgctcgggttcatcaccgttgcaatgattcctatccccatcgtcttttatatctatggcaaaaagattagggcgctcagcaagttctcacctaatttctag

SEQ ID NO: 27523 - DNA, 1134 bp, Emericella nidulans
cttccaatccagtatgtagacgcgaaggcgagaattgttgttcgcgcggttgaagaattggccgtcgtttcacaaggcgtcgaggaaatcttcggccagtgcgaaaagcatgaggaggctgagaaagaagaagttgcgcggagcattccagcaaaggcagctgacgaagtcgatgatatccaatcctatcgtccgctcatcaagaatcgccaatggatcatatcgaccacagacctcggcttcatcgctcaaggctgcaaagtgctcggtagtggaggcggcggtgacccatatcaagagttcctcaaagtcagcgctctcgtacggaagaacccaggcacagtcagagtagtctcaccagactatctccctgatgatgccctggtgggctggacagggaacatgggcagtcccgaagtcagcatggaacgcctggaaaacgacgaatgtctcaaggcgcatgaagagctcatgcgcgccaccggcagcccccaagtatccggcttcatggctctggaaatcggtggaggaaatggcgtactaaacctgggtgttgcggcaagatttggtgttttctgcatcgacgccgattacatgggccgtgcgtatcccacgacctggcaggtcacggcgaatgtatacggcactgagcgcggcgaggctctagttcctatgaccatcgccagcggtgacggagcgaagcggatgattgacgagcttgggggtcctgagagcgcggcgatccttggagaaggaaaaataacaagtgtagaacgcgtccttagaaccggccatacatatggtgtgctcgaggtagacggaggcctgccagatggcacaaaagtcattatcagaatcccgttcaagaacgagaatgccttcgtggaggcggttctgccaactggggagtcccggatactagcgtcggtgccagatttgattgccgttcttgatgcagagacaggagccggctgggtgtatataaaaatattgggtaccggtaattcctacgtcccgcccatcccacttctcatgattcgcgcggcgtgcaaaaagaaagagtcaattcgcagcgcaactggtcgtaacagcgcaagagaggcatcatcatcagcccaccctcgtaaccgttga

SEQ ID NO: 27524 - DNA, 585 bp, Emericella nidulans
tatgctagcatgcccacattcattgtattcgagcgcggccgtccaacgaacaccattcgcggcgcagaccccacgaaactaaaccaagtgatccggaagcttgccaacgaagccagcaagagcgaagcctcggccgactctgctcagggctcctcttctggcggcacctgggtcggagccgcagttcccaaaggctacagcgacatcacggaagaatatgacgtgaggggactcgaactgctgaaccgagacagcgagttcggcgtggccaggacactatttgagtcgtcgaagccctctgcgcttggaaacggcaagggcaaggatggtgcagcggactggatcgagagcgacactgatgagcagttgatgctcttcatcccgttcaagtctacactcaaggtccactcgctccatatcacgtctcttccgccagccgagggagaggatgacgatgagattccgatgcggccgcggacgattcacctgtacacgaatcggtcgcatgtgcttggtttcgatgaggcggatgacattcctcctgtgcagacggtgacgatcgaatctggcgactgggattcataa

SEQ ID NO: 27525 - DNA, 798 bp, Emericella nidulans
ccggcacttcaatcgagcaagctcgccttcattggcggtggcaacatggcgtcggcaatcatcggcggtctcctcagccaagggatcaacaagcagaacatcaccgtgtctgagccatgggaggtcaatcgcaacaagatcgccgacctgggtgtcaaaactaccacttccaacgtcgttgccgggggtgaagcagacctggtcattatcgcggtcaaaccgcaggtcacaaaggctgtgtgcgaagagctggccgacgcctggtccaagcgtgagacactgccggtggtagtcagcattgctgccggtatcactctgggtagtctacagcagtggctcaagacatctgacggcaggaccacgcatctggttcgcgtcatgccgaacacacctgcgcttgtcggagagggtgcatcgggcctgttcgccagcgcggacgtgactgcggaggagaaggagcttgtcaacgcgcttctcggcagcgtcagcaaggctacggaatgggtggacaaggaggaattgatcgatgtcgtcactggtctttccgggtccggacctgcatacttcttcgccatggtcgagcacctgatcgccagtgccaccgcgctcggcctgccggccgagcaagccacgcgcctggcggcccagacctgtctcggagccggaaagatgctgaccgaatcgtccgacagccctacgcagctgcgcaagaacgtgaccagcccgaacggaacgacgcacgccgctctggagaccttcaatgcgcagactttgaccaggttgtggataaggctgtga

SEQ ID NO: 27526 - DNA, 2316 bp, Emericella nidulans
gttattgcctcagcggactacgacccgattaaccacctgaacgagatcttctcgcacccttctacgctgtcctccgtttccgatgtgtctcaacggttgcgtgattacgaaactgagctcgacaacgagatcggggcgcttgtagaagaccaagttacatccaatgcagagagcgtcgagcgcattcaagccgctaaatcagatctgtccgagttgttcaagaaaatcgacgatgtccgcgaccgcgcgtccaagaccgagcagtccattacagaaatgacggcggatatcaaacagctagacaacgcgaagaagaatctgacgcagtcgatgacggccctgaaacggcttcagatgttgacgaccgcgtatgatcaattgcgtgttctcagtcgcacgaggcagtaccgggactgttcccagctgcttcaggccgtgattcagctcgtcgcgcacttcaagtcgtatagatcgattgatcagattgcgctccttagccggaatgtggcggatatccaaagagacttgttggagcaaatatgtgaagactttgagctggcgttcgccaagggggaggttggcgcgaggaagacggcgctctcggaggcatgctctgttatggatgcgcttggggatcatgcgagatcgagattgatgacttggtactgtaatttccagctgcgcgagtaccggcaggttttccggaacaatgaggaggcgggctcactggacaatatttcacggaggtactcatggtttcgacggatcctgcgaatctacgatgaagagtacgcctctattttccctgcatcgtggagagtggatgaaatactggccaatgcgttctgcgaagggaccagagatgatttcaagggaatattatcacggtctgtgcggaatggccagactatcgatgaaacgcttgactttgaacattccctggaacgacggtttgccattgattctcgtccatccaccgatacatttgcgtcagcggaaacgcctgtattcggccaagctatctccgaagcatttgagccttatctaagtcctgttaaacctccaggcgaagaattcgattcgcacattgttatttcctcttccatggagctgttcacattctacaggcatgctctccagcagtgtgcaaagctctctacaggcgcaagtctcgcggatctggcaaaagtgttcggcaagtatctcgaccagtacgctcagcagttagaggagaagataaagggccgtctcgacaagaatctgaagcagagtgtcgacttgcaaagtcaagctgactcattcatgggaatagcgtcggctgctgtgcgaggcctagtgcgcaaagttgagacagaactcgagccatgctggcgagaaatgcgcaacaccccttggaatcggctggaaggggtgagcgaccaaagctcctatgttggagagctattgtcgaaaaccaactccaaggcgtcagaaatactgcaattgatccacaagcaacaatacgccagagcttttgctgaccacatagtggagttgatttcgaacatcttcctgcaaaacatcttccattgtaaacctgtctcggagacgggtgcagaacagatgctcctagacacatacacccttaaaaccggtctatcttcactcctcccggcgctcccaaacgccggtttcgtcaagcgtgtcaataacagcttcacgaagatcgaaaccttgctcaagacccttcaagtccaaccatcgcctccagaagccctcgtccaagcatacctaattcatatcgcagatcgaaacaataacaacttccgcaaaatccttgaccttaagggtatccggagccgccaggagcagaaccaccttgtcgaactcttccagattcaccgcacttccgatcgctacgcctcaaacatccaggaaacaaacccctttctgggcgcactccaaacaacctctgcttcctcctcaacttccgtctcccaaggcctcggccttggcaatctcggcacctctgccgcggcatcaacgagccgctttgatgcgtcgctgcttggctctgcacttatttccgctgcgaaggatggtgtggataggctgggcacgcccatgtcctctactcctgttaacccgggtgcggctggagcaggtaacttggccgcttctacaccggccgcaatacctgggtcttctgggccgaaccaaagccaggccggtgaggtggggtctaacttgaacgagaaccttaagaaccttggcaagttcttccgaagagatctagggttcggcggaagatttgggaggagtggtgatgatggctga

SEQ ID NO: 27527 - DNA, 486 bp, Emericella nidulans
cacccttccggcaacgtctccttcggccaggtcctggtcaagcagatctacgacgcggtccgaacaggcccgcaatggaacaagaccctactcctcctcacctttgacgaaacaggcggcttctatgatcacgtcgagccccctcttgccgtccgcccggatgacaagacgtacgttgagactgctgccgatggtaccgactacaccttcacctttgaccgtctgggcggccgcatgcctacgtggcttatctcgccgtacacgcccaagggccacattgaagactacggcgtcgaccccgtgactggccagaaggcctcgtacagcgcaacctctgcgctcaagacgctgggttacctgtgggatctcgaagactttacgccgcgtgttgagcactcgcccgctttcgaccacttgattgggcccacgttgaggagcagtcctgagacgctggcgaacccgcatacgtttcccgacgccgtttag

SEQ ID NO: 27528 - DNA, 846 bp, Emericella nidulans
gccaccaacgggtcctcatcgtcagaagcgacgcccgtcgtcagcacgcttcccggtcctgaccataactggcaggttacgcttgctggaaagggcagtgctaagaagcgtatagtcaccggtgcaaaccaaggcattgggctcgggatcgcagaagtcattctggccaactctgcagcgcacgtctactctctcgacatctccacgcccggcgacccctttaacgagctcgcgcagaagaacccgaagcgcttctccttcatccagacagacgtgacctctgaagaatccgtccaggctgctctcgaccagatcgtctctgaacaaggccggttggacgggatgattgccaatgccggcgcaacaaagcaccagcccgcgttggacttcaccatggatcaggtcaagcgcctcttcgagctcaacgtcttcggtgcctggaactgcgcaactgcggcggcgaagacattcatcaaactcggcatcaagggctcaattgtctttactgctagcatgacatcttacagaccgaaccgcgcggcgccgagcgcgccatatggaggcacgaaagcggcggtacggaacatgacgcataccttggcgatggagtgggcgaagcatggaatccgggtgaacagtatctcgcccgggtttgtgaagactgcattgacgtattatgttgagacaagtcccgactgggataccaagatgaagtactatggggggatgccgagactggcgattccgcaggagttgggtggcgcgtatgtttacctgcttagtgacactgcgacgtatacgacgggaatcgatattccaattgcggggatcgtgggggcttggtag

SEQ ID NO: 27529 - DNA, 702 bp, Emericella nidulans
aaaagctacgataataagccatcgtcaagtgcatcttctgcggcatcagatgagcgtatctcggtagtgaagctctcaaaatccggtgggtgcgttgatcgtgacgctgcgtttatgaaggcagtgcgcgagtcccagattcgaacatacttcttcggcaacccggtccctaccacggcttcatcggcattgtctatatcctcctcttcaacaacaaatgttacactatcgccacacgcacagcagctagactttgacgctatagccctctacaactacaccacctcgtcggcagaggaggaccaaaacgacgaggacgactatgatcccgcccaattgacgacggactccttcctcccgggaaacaacgaggcagagagcgcatcctctcttcccggcctcaattcggcagccaatgccagcgccgctgccgccgctggcgcactcgtgccgctgaaaaaggtcccgggccctgcgccctctgcactggccaacactcttcttgctattacgcatgcctctcccaccagcagcccatctgagatccgggacgcgagcaccatggggttcctttacgtcgctgacgtcgatagcgaacgtgggaagatcagggtccttgcgccggtggggggccgggttccctcacgagcgatcatctggggtaagaaatggccggcggaagttgtagggctggtagggtag

SEQ ID NO: 27530 - DNA, 309 bp, Emericella nidulans
ttcacgcccccgatggtcgcggcgattggctggggcacttatctattctttgccgcctggaacgctttcttcatccccgttatctggttcttctaccccgagacggcgaaccggagtctcgaagagatcgatttgatcttcgcaaagggctaccacgagaagatcagctatgtccgtgcctcgcacgaactgcccaagctctctgatgacgagatcgaggctgaggctgccaaataccaatacagtcctgagaccgaggccgaggttgagaagggccatgtcgcgcatcctggtagcaccagtgaataa

SEQ ID NO: 27531 - DNA, 1527 bp, Emericella nidulans
ccacccaaagagtcaaaagagaaaccgaccatactgcgcgctaatcgcaatgcgcttaggcagtggattgcggatgcaggtgtgggggaagacgaggagattgatgtcaggtatggacatcggcttgtcggcgtgcagctgttgagagagggtggagatggaaatgtggtaacagccgagttcgcaaacggcgccacatacaccggttcccttctgatcgctgcggacggggtacactccacagtacggacactgatccttcccgctgtgaagccggagattttacccgtcctcgtctaccatggcgacttcaagctcagtcgcgaggaatacgagtgtgtgatccggccgcatgcaggcgagtccacgatcgtcgcgggcgtgggcgacgggtttaacacgccgctgactgtctgcgacgtcacgtcaacgacagtgcacatggactggacgtactcgcggcccagcattggtgacaacgaccctctgtataatcccaatattacgtcggaggaagctaaagtcattcccgaggctttgatcgaggaaatcaatgcgaaaaagctgggagaaccatggtcgctgttcctgaatggggaggcgatgcgcaggcatcgggtgttcaattggctgacgcgatgtgtttcgatggaaaggagtgacgtgaattcctgtacgggcaaaggggtcgtcttcgtcggagactcgtggcatgccatgccaatctttggaggcgagggtggaaaccatgcaatattcgatgggattgagttggcgaagatgttggaagtggcttggggacgttccaaggaggatgtgcaggcagcgatcgggaagtactatgacaagtcttggagacggtgtaatgatgctgtgcgaaggtcaaagcagaggttctatcagcttcatcgacctattagcgagtggattgagattgcggagaagcagaagatgcgtgcctgctcggctctcctcgagtatcgcgtaaacctgctgcacgcggaactctctgtgcttgatgtactctcgcattttatccggaaggtcatcgatcactgccccgtgcgctgggtagcccaatggaaggttcaggttagccatctgtaccatgctattcatgtattgtcccaagtcttccaccaccgagtatccatggccgagcacattgtcgcctgtgaagagggcgttctcttcttcaaagagaaagcacatatggtcggcagcgtggccgggggagatgtctatatccctctcttcgaggactttggcgatatcacggatccacgagggcattccctggagcagacagggagtgtgagccacgtcgccctccatgcaagcatttccgcccaaaactcggatgacccgttcagtgatatccgtcaccacaggcagagtagggatagtgtttctctgccggaaaggtactcattccagaagtcctgggcaaatggtattctgaaggccatgttggtgactgaagcgccatggggatgccgagcgaaggaatgtgcgtcgagtctgtaa

SEQ ID NO: 27532 - DNA, 1977 bp, Emericella nidulans
ctggccgttccaatggtaactttcccgatggaagagtgcatcagccacgccctgagccggatagacccgaacattttcccatcattctcgcagatgttctcaatgcagggcaatgcagccctatcagacgtgcggcaggaatttcttttctcttgtgcctcacacaagttaataccggagtccagcatcgagcggttgttaggctcttatatgaaggatgagcttaaggcgcagatcagcgccaaccacgaacgtgcggagcagttgatcagcgatatcgaatcgactgaggggaatgccggtgcgatcgtcggtgctatcacagaatctctcgacgttatgctgctcttccgcagcccaaggcagatcctgcagccgctgtgcgcattgcttgattcctggcattgggacgaagatcagggagagagccagccggtgtacgatgaatttgggagtattctgttgctggtgctgaccttcaagtaccggtacgatttacggccgtgggacctgggcatcgcaagcaacgattcgttcattatcaaattgattgagcagggctcatctagccagaagctagacgaactaaccgaaaagcagaataagaacctgggtgagtggatagcagcactatttatcgccgagggcatcagcgaggaaactatgtcggcgtgcagtccacaggaattctacatgcttgtctcgacactcttcagccaaagcttaggcgcgtgtgaagcggggaagctggagttcgatacactgaaagggggcttcgagtatctcctcgagccattcctccttccttccctcgttgtcgcactaacctggctcggcaaccacatctgggaaagcgaagctgatccaactatcccactaaggaccctgcagtccttagtatcacccagttcgatatctggcgaggcgcgtgagatccacctcaccgtcttgaacatcacttcacgctcgctggaagagcagctcaaagacgttcgtgcccgccatcccacacgaacagacatcaagcctatccttgatgctctggatccatgtctctccttccagcgaacagcaagctgccataaatccgagcttgagccatggactacacataaccctggtgggcttctaggtagtatccgggcaacattccaatcgcttatcctttggagcacaagtcccgatgtctcaatggctccgccttcatatacgcatcgccaggtcataactgcgatccgcaccctaggcgcttcccgcgtactggccgcactactcgacgaacttaaatttcaaaccgagtcgaatccggggacagcaggtatcgccctcgacattgcagcaagcattgtttccgccccactgtcggagtctttcgccttcgaccagttccaaacgcatcatgatcactccacgtcgaaagagtcagaacaagcaccccactacccgatcttcaatctccgcgacgctctcaatacgcagcatgagttagttcccaagttatctgaaaaagacctcctgcgcgcggaaatcatcgtccgtctctaccgccgtgtaaatactctcctcgccccgcctgcgcaggtagcgcctaacctcgacatgaacatgggcatgaacgtcaacgtcaatatgaatatgaacaacatcatcggcgatatgcacctcgattcttctggtgacggagcttcgaaccagaacatgaatatgaacatggagacggatacccgaacacaagcccaggaacaaggacataacaatgaacaggcaaacctcaaccaaataatggataatgctgcggcggctgtgggaatggatatggatatgaacatgggtgggggaggagatgggatgggtgttggtgttggcgttggtgaattgggacttggcgaggtcgaccagagtattgatgatgtgttaaatgccgccgagatgaatcctgaatttttggatctggatatggagggaatgtttcagtga

SEQ ID NO: 27533 - DNA, 663 bp, Emericella nidulans
aagctctctagcgatgtgccaggggcgtcatttgaccttatcctccatgctacatcccgggcggcctattattacggtacagggacgtatcgatacgtcaacgacacgatgtacaactgggttttccctgccaccaaaacatcagggtctattaccgtaccaggacagtttggcgatgatgctgagcagatcgaacttgaccctgccgcctctctaacctggtacgaccgcgtctggggaagcgccgagcttcgtaaaggcaactcgaccttttttgtcctctatgttgacgacagcgacttgatcctttggatgaacgtcgttgagagccttgatcctcctttcaaatcgcggagcgttaatatttgtgcgcgcgggaagagttggcatcatatacatgcaattgatgtctttgagccggatacggatgcggtctggacatcgccccggactgggaagacgtacccgcaggaatggagacttggtattgaaggacgcggagaactgcatatcaaaagtgttattggggatcaggagctcgctgccaagggcaatgacggtgcggggatctatatggggttttcaacgtttgagggagtgttggatggggaggatgttaccggctttggagtctcggagctgcggcttgccgggattgtctaa

SEQ ID NO: 27534 - DNA, 948 bp, Emericella nidulans
cctcctaagaagcctgatcaacctaagaagaagaaggccactgtcgatgacaaggcccaagccgctcacagcaaaaccgccgatgagaaacgaaaagcggccgagaaggaacggcgtgaagcagagaagagggctgctgagcaggcgaagaaggaggcgctggagctgttcaagcctgtccaggtgcaaaaagttccctttggtgttgacccgaagacagtgctttgccagttctacaagcagggccactgtgagaagggtcgcaagtgcaaattcagtcacgacctaaatgtcgatcgtaaggcggccaagaaggatctttacactgattcccgagaggcggaagacgagaagaagaaggccgacaccatggagcaatgggacgaagcgaagcttcgttccaagcacgggaacccgcggacgacgactgacaaggtctgcaagtacttcattgaggccgtcgagaaccagaaatacggttggttctgggtgtgtccgaatggaggtgataagtgcatgtacaagcatagtttgccgcctggattcgtcctcaagacaaaggagcagcgcgcagcagaaaaggctatgatggacaagtcgccgctcaacaccctgaccctggaagattggcttgaaagcgagcgacacaagctcaccggagaattgactcccgtcacacctgaaaccttcgccaaatggaagaaggagcgcatggacaaaaaggccgcggaggaacaagcccggaaggctaaggaagccactggacgaacattattcgagagcggcaactggcggacagaagagagcgaagaggagtcagacgaggatgacgacggagcgtggaacctcgctgctctacggaaggagactgagagaatacgtgagcagaaggaagaggagcgtctggcgaaactacacggtgagcaacagccaggtggtgaggactga

SEQ ID NO: 27535 - DNA, 903 bp, Emericella nidulans
cctgcacgtcttggaaggttcggcggtcaatttgctccagagttgcagatggacctcctcctcgatcttcctagcgtattccacagcgtcctctctgacaaccggttctggacagagttctctgccagccccttcctccgtcctagtcctcttcatttagcccatagcttgacgaaggccgtcggcggggcgaacatctggctaaagcgcgatgacctcaaccctttcggcagctatcaaacccgcaacatcgtcggccagattcttttcgcccagcatattggaaagacagagatttccatggaatgtggatttgcagggcatggtctcttctgtgctaccatgtgtgcgcgcatgaatatgaagtgtacaatcctcatgggggcctctgatatcgccgcacaacctgacgccgttgaggaaatgaaacagctcggcgcgactgttgtcagcgttcaatgctcaatcagtgacgatggcagcggcaccctccgagctgccaccaacgaagcccttcgctactcgttgactcgcctcaattcgacataccatatcagtactggcaccgtcggcccccatcccctcccaaccatcacccgcaccttccaatcgctactcggccaggagatcaagatctgcagctcagaacttccgggcaggggacgtcgaaagaacaacttcagaccgtccgcccttgtatccacttccggtgccgcagctctaggcatgtttgcgcctttcatttccgacccagccgtccgcctcattgctgttgaagcagcggacgcggcaccactaactcacggctcgccgggcgtaatgtacggctgccctgaattggctcattggagggatctcgggcggctagagacggttacggcgtcgagcgaagaagctttctag

SEQ ID NO: 27536 - DNA, 318 bp, Emericella nidulans
aagaagcgtgtcctctgcgtcttcgacggccagcgccgcctttggaaggacgaaatgatgctcgacaatgagttcgaggtccggctaaagctccccggcggtgctggagacggcacaaaccgcgaagcttatatcaccgacctggatgtcgagacgcttaagcgcgccaacgggatcctcggtgctactgaggaggaacgtggcgcttggactgaaggaactggagggcagctcattggacagccagcgatgctactccctgacttctcccagaaccaggagggggatgtcgtggatattgacgagttgatggcttga

SEQ ID NO: 27537 - DNA, 531 bp, Emericella nidulans
ccggccgagctgctcaagacacagcaaattggcgttacggcaatccagaataagcacgacgaggccacgatcaaaggtcttgaagaggcaggattcaaggtggacaatggacccaacggcgcagggctgctgatcaagtatttccagcgcggaggtggctactatattgacgtcggggctagtcaactcatcgtcgacggccatatcaagatcaagcaaggagttgagatcagtgagatccagtcccacggcctcaagtttgctgatgggacagaactggaggcggacgagatcgtcctagctacaggctaccagaacatgcgaacgcagacaaggcgcctgttcggtgacgaaacggccgacgctgtcggggatgtatggggctttgacgagcacggtgagatgcgaggcatttggaggccgtcgggacataaaggactgtggtttatgggtggcaatctggccatctcgagatattactccaggattctggctctgcagataaaagctgctgagctccggctctcgtag

SEQ ID NO: 27538 - DNA, 1332 bp, Emericella nidulans
gccggtcagcccctcattatcctgtcgacgcatcaagtcgcgcacgatctgctcaaccggcggagtggacgctactctgatcggccgcgcatggtcatggccggtgagctggtgacgaagaatatgcacatgctgcttcggccctatgacgagcgatacaagctacaccagcgcatggaagcccctctcctggtgctccgctcggcgagcaactaccgccctctccaggatctcgagtcgcagcagctgctattcgatgtgctgggagagtgggataagtttggcgagaagggtgtcgacttccaccaccatttcgagcgagccatggcgagtaccatctactgcctcaactacgggtaccgattacagacaggctatgagaaagagctcatggacggcaagaaggtgcaggccgagttcgcccggacggcgcaggtcggcgcgtaccttgtcgactcgtttccttcactgaactacctgccgaaattcctcgcgccctggaagaaggagggcgaggggctgtacgagctggagcgacagttgcacgtcgggaacctcaagaaagggttgagtaaccgcggctggaacttcacaagtttggatacttcgaccgttgcgctagactggtttattgtcgcttggatcacctcgggctcgacgtgggtgaagaaggcacagcagcttctcgacgaggtcgtcggcaaggatcgaatgcctacctttgaggatcgtccgaagctagcatatatcgatgccattgcgagcgaaaccctccgctggcgccccgttgttgtatccggcgtcccccacttcacaaaggtccaagatgaatatatgggctaccatatcccagcgaactccaccgtcctccccaacgcctttgccatctcccatgacgagtcaatctttggcgaagacgtagattcctttatccctgagcgctggctcgccgaggatccaccgtccgaaccctcgatcgacgcctgcggcttcaacacttccgcccttaaggatctcccgcacatcggcttcggttggggacgtcgcatctgcacaggtcgcttcattgcgcgcaatcagctatttatccagatggcgcgtatgctctgggcgtttgacgtcgacgccggggttgtcgatgagaagacggggaggaggcacaatgttgacgatatggattgtaccgaagggttcgttacgcttccgaagccgtttagggctgttatgcggcccagaggggagtgggttcgccagaggatcttggagcgggggacgacacatgggttggatcatgcaaagatcttgcagaacgcaaaacttggtcggtcgtga

SEQ ID NO: 27539 - DNA, 1500 bp, Emericella nidulans
tcgcgccgtttggccttcttgtttctgttctcagcattgttgctccaggccacagtctcgttcggacgcttcttgagctctaagcgacgcttcctcgcgctgcttatccttgtatgcaagggtaaagaagtgccaacctggcgggggattacgcaggccgacgcggacaatctgatcaacagcttcgcttacactagcactgaaaagccccgtccgcctttgtttcggaagtcggcgcaaaatgttctgcaaggaatggccgatgcttggaccggtgtcatgcgggtgaaccccatcgaggagacagcgtcaagcacccattccgacagcggaggattcacagcgtcccaggctcgggacgatgtccctgacggaggtttcggtgccattgtcagattctttggccgtttattctccgctggtctctggttcctgatggtcaaaaatcgaaggaatttttcttatcagttgcagcaattggttcttgcacgaacgccctctttccggactgatcgccgctgcggcccttccgcccttctccgtcagaacggcccagatgtcgtcggcgcgaagtcctggtgctgttccttcgacgccaagggtcacctctccatcaccgacaccatcagaaggcagaacctcgtcgagatcgcgggatggatattcagcgcccacgacgcgctcggcagcccgacggcagcagcatctcggcgacgtcacggaagagacaacggactcttcaccaccgcgatcccgtcgacgcaagtcaaagctcaagcagcctacatcgggagaaccattagtggcgcggacaaacgccgcggcattcaaacacaccagatcacaccctggctcttcggagctcttgtgcccatcgccgcgacagacttcctgcgtcaccgttcagaacgggtcaacaggttgtacatccgctgcatgggtcggcttatgcgcgaaacagaagtgtccggctacaacggcgtgatctggtacctcgttggcgcatataccgtcctccgctttttccccaaggacatcggcgttatgggcgttctgctcctctcctggtgtgatactgccgcctccacctttggccgcctttacggccgctatacctttagcttgcgcaaggggaagagtcttgcaggtaccttcgctgcctggctagttggggttgtcaccgcggccgccttctggggctggttcgttccctacattggtacctttcccaacgatcccgaggacgcattcctttacacaggccgtctcaatcttttcccagatcccgtgaagcgactcattgggtggacagtaacatcaccagacaccgagtccggctctgttatcaccggcccgctagcgctgggcgtcatgagcgttgtatccggccttgtggccgcaggctctgaatttatcgacttcatgggctgggacgataacctgactatcccagttctcagtggcatcgggctctggggtttcttgaagatttttgggtga

SEQ ID NO: 27540 - DNA, 321 bp, Emericella nidulans
atcctcagccttcccccgatgctcctcgccctagcccttctgcccatctccttcactcttgccaccccagtggacatttcacctccctacagcttcaccgagccgcaagttgtggcatcctttactcccatttccgccgacatcaaaggccacgactccctcgaaacccgtggcgatgacgacaagctcaaaaccggcgaccacgactgcgagaacaaactcacggggatcagagcgaggactcaggaatggaagtacgacaaggacaagattgcgacgctcaaggtcagctttgagaaaccaagaaagaaccctgaatag

SEQ ID NO: 27541 - DNA, 633 bp, Emericella nidulans
gcagctcttatgcctattggagacattccaacaatctccctgctctataaactcaaacgcctagttcccaacgctcacccgctgaaatcgccttccaaggttctcaatgatacagtcgcaatggtccgccatgatataacgaagcttcaaggtgttgactgcatcgtcaacgcagccaagcgctcgctcctcggaggcggcggcgttgattacgccatccataaagctgctggtcccgacttgctcaaggaatgcaggacactaaatggctgcgatacaggagatgctaagataacaaatgcatacaacctgcccaacaaacgaatcatccacaccgtcggaccgatatacagcgatgcgatgcggcggggaaaagacgagccggaaagactgctgcggagctgctatcggcggtgtcttgaggtggctgttgagaacgagatgaagagcattgcctttaatgcgatcagcacgggaatatacgggtacccgtcaagagatgcggccaaggctgctcttgacgagacgcgcaagtttctggaaaccgacaagaacacgggccttctggaacgagtcatattctgcaactttgagctcaaagatgtagaggcttatgaacagttgataccgtga

SEQ ID NO: 27542 - DNA, 987 bp, Emericella nidulans
ggaatcaagcacctctatcaagtgatcgcagaaaatgcgcccgatgccatcaaggcaggggatatcaagaatcatttcggccggaaggtcgccatcgatgcttttctcatcgctgtacgctccgaaggccagcagctcatgagcgataccggcgagaccacgtcacatctcatggggatgttttaccaggacgtacgcatggtggataatgggatcaagcctctatatgtttttgatggagctccaccgaaactcaaatcgggcgaactagccaagcggagcgctaggaaacacgaagccactgaagcgcatgaagaagcgaaggagacgggcacggcggaagatgttgagaagttctcgcgacggactgtgcgagtaacgagggagcacaatgcggagtgcaaaaaactcttgaagttgatggggattccgtacatcgatgctcctaccgaggcagaggcgcaatgtgctgtgctggtcgcgcgggcaaagtctatgccgcagcatcggaagatatggatacggcccaataccgctctaaaactgatccgcgaccacggtaccctggaaaaggtggttgagtccatcgagaaagatcctaagcagaaatatgtcattccggaatcttggccgtatcaggatgccagagaactcttcctgaacccagatgtccgagatgccaacgaccccgaatgcgacttcaagtgggaggcgccggacatcgaaggccttgtagattttctggtgaaggataagggattcaatgaagaccgggtgcgcaacggtgctgcccgattacagaagaacttgaaaaccgcacagcagtcgcgtttggaaggattttttaagccggttgctaagacagacgcggagaaagcaaccctgaagcgcaacgacgacgagaaaatccaagaacagaagaagcgcaagaaagaggaggctaaggcgaaaaaggaagcgaaggctcgaccacgagctgctgtatag

SEQ ID NO: 27543 - DNA, 438 bp, Emericella nidulans
tccataccgaccgctctggcaccgcccaagggctctggtattgttgccttcgagtcgccggacgatgcccgtaacgctatccaacagtttaacggctatgattggcaaggccgtaccctcgaggtccgtgaagaccggtttgccggctcaggacctggcatgggccgcggtggctatggtggctttggcggccgtggtggctttggtggtcgtggaggttttggcggccgtggcggcttcggcggtggcttcggcggccgtggaggttttggcggtggttatggcggtcctcccagcggtcctgggtttgacgctgggccctcggtcccccccaacccattcaccgattatgctacctctggtggtgagaagagtaacactatttatgtccgcaatgtgagtatcgcgaatacagaacaaagcggcctcacccactga

SEQ ID NO: 27544 - DNA, 777 bp, Emericella nidulans
gctcccatcacagatgacgtggtcgctggactcaagtccacgatcggtaagctcgaagctcgcattgaggacttggaaagccgcctcggcggtgaacccaagcccaagtctatcgcggagcacatgcgaatcattcttatgggacctcctggtgccggcaagggtacgcaggcacctaagatcaaggagaagtactgcgtgtgccacctggctactggtgacatgctgcgatcccaggtcgcgaagaagaccgacctcggaagggaggctaagaagatcatggatcagggtggtctggtcagcgatgagatcatggttaacatgatcaagagtgaattggagaacaacgcagagtgcaagaacggtttcattctggacggtttccctcgcactgtcgcccaggctgagcgcctcgacgagatgctggttgctcgcaaccagaagcttcagcatgccatcgagcttaagattgacgatgccctcctggttgcccgtatcaccggtcgtctcgtccacccggcttccggccgttcataccacaagatctttaaccctcccaaggaggccatgaaggatgacatcaccggcgagccccttgtccagcgctccgatgacaatgctgaggctctcaagaagcgtctggtcacatatcacgcccagactgcccctgtttgcgattattacaagaagactggtatctggaggggtatcgacgccagccaagagcctggtcaggtctggaagagccttctcggtgtcttcaacaataagaactaa

SEQ ID NO: 27545 - DNA, 1287 bp, Emericella nidulans
tccagtctgctcggtcaggcggtcgacatcgcgcagtctcaggcgaccaaagtgctgaaggtccgatccgagcagacggccaatctctgcaaggaagattttgtcaagtactttatcctgaaccgcctctttgcagacgaatgcgaggctatttctggtcggggtggaactgcctttaagaccgttgttggaaaccagatccgcgacttcatcaaccggttcggtaacgagcaacggcatcggatcgtacaggtaatggacgctgatcggtgggacgcaaaagactttggagaatccgagtcagaggttcttgaccgtattttaagtgcgagcacaaaagacgttgacacctggattgacgtctctaagatttgggttgccaaggagcagaagccaccacattctcctgcagtcaatggctccaaggagaaggagaagacacggtctgccgtgatcgatgagcaaaagtatattctctcagactcagcactggcgatgatgagaagcatcgaagagtatcagttcttgatggcaaacatacccaacatgataccagacatctcgtctggtcttctagaatcactaaaattattcaactcgcggtcatcgcagctaatcctaggtgcgggggctaccaggagcgctggtctcaagaacatcacaacgaaacatcttgcgttgtcttcgcaggcattgagttttatcatcgcgctggtcccctacattagggaatttgtccgtcgacattcaccgcctgcttccttgatggctgatttcgacaaggtgaagcggttgtaccaggaacatcagtccggcatccatgaaaagcttgtggatatcatgggatctcgatcgtccatacatgtcaacgcgatgcggcaaatcgactgggattccagctcccggcccgcgggtgttagtccgtacatggagacccttacgaaggagacgggcacgttacaccgagtactgagcaaacatctgccggaaatgacagtcataatgatcatggacccggtcttcaagagttatcgagaccagtggacccgggcgtttgacgaggctcaaatcaagacggaagttggaaagcagaggctgcaccgcgacgcggagtactttcaagccaaacttagcaagatagacgggttcggagatttgggcgaacgtttgttggaactggtcgacaagaagacgacagaagcgccagctcaagagtcccctgaaagatcctcaaggcaaggctcaccccagtctcaaaatgaggccaagggacagggccagcactga

SEQ ID NO: 27546 - DNA, 813 bp, Emericella nidulans
aagctgtctctcctcgctgctgcggccatcgcgcccatggtctcggcccattacttcttcgatactctcgttatcgacggccaggagaccactcctaaccagtacgttcgttccaacacgcggcccgagaagtacaacccgaccaaatgggtcaacacccgcgacgacatgaccccggatatgcccgacttccgctgcaacaagggctccttcacatttgccggccagacggatactgcggaggtcaaggctgggtccaagctggctatgaagctgggcgtcggtgcgaccatgcagcagcccggcgcgggccatggtgcccccggtgcggccaaccagtacgagggcgatggtgactggttcaaaatccacgaggagggcatctgcgacaccagcaaggacatcaagaccgatgcctggtgcacttgggacaaggaccgcattgagttcaccattcctgctgacctcccggacggagagtatctgatccggtcggagcatatcgagttcagatgcgcccaggtcaaggtcaccggtggtggcaatggaaacccgcaggataccatcaagttcccaggcggctaccagaaagacgacccctcgttcaacttcagcgtctggggcggcatgaaggactaccctatgcccggcccggccgtctatactggtggttctggctctagcactggttcctacaatgaaagcaacgcggaagactccaatgagtacccctaccagaaggagtccggcacttgccagagcaacttctaccgccgcgagcacgctcgtgacttcagccacagacgcgcttag

SEQ ID NO: 27547 - DNA, 1308 bp, Emericella nidulans
gcgctgttcttgaccggctaccttttacttaccttcacccttaccctttctttttctaccttgcgcgtctgggcagccggtaggtggcctgatgtggtcgcacaagaacttgggccccagctctcctcgctggcttcaattataaccgagcctggggctgtggagtcggactttgaacgttggagcgcgtacagcgcgccccagccgggggtcgtggtgtcggtagccactgaggaggacgtcgcaaagacgaatggaggccatggctgggcggacacatttgacttgggacccaatagacgcgggctgcttatcgacatcacgcagttgaatacggtcgtattcaatgccaaccggacgcaggttacccttggcggcggggtttccattggtgaagcggttgcagcagcagtcgagcatgatactctcatacctactggcaactgcaactgcgtcgggaccctaggcgctattctaggcggggggtatggtaaccttcttggcatggtcgggttcggggttgataatgtcttggagttgaaggtagtccttgccgacggggaagtgcatacagtaacgcctggccgtcagggcaaggatcatgatctgttctgggcgctccgcggcgcgggccctaactacgggattgtcacttcggcaaccctcaaggcgtaccccgtggactctgcgactaatatcacagcgtggatgggacagcttgtattcagcggagaacaggtagaggccgtcgtgcaggctattgaggagctgactctcacgcccgagatgaacatcttcttatactacatgacagtgaacggcacgcagaggttcatcgatacgccgttctactatggcgatgaaggcgaggcacgagggcgagcagcttttgcatcccttcttgacatcggtccgattgaagaccagactgctgaagtgccgtatgcccgctggaatgatgggtcagatggcttctgcaccagcggtgggtataagccggcttattctgctgccctacgtaagttagtgccagagacctggaagagggcgtgggatgagtatgttgcattcacggcggtcgaagagacgcagaacagcgttgttattatggaagcgtattcgctggacagggcccgtgctctaccggacgactccgccgcgtttccggggcggagcagggtcaacttccaggctgtcgctataccatggtactatgaccaggggctggaaaatagcgcgatagcttggggggagacaatgcgagctttgtggtgggagactgatgggctggatgatccggctgtgtaa

SEQ ID NO: 27548 - DNA, 615 bp, Emericella nidulans
gattacggcaacgcaagctctgcacctcgttggcgccttcaaacccggaactcggtcctctggcacgcaggcgcctcctccgtctcaatagctggaatccagctcgccaaagccgccggtgcatccgcaatctacgtcacagcgggctccgacgaaaagatctccttctgtgtgaaccagctcggcgcgacagcgggcttcaactaccggactcaaaactgggccgaggaactttctaaagccacaaatggccgcggtgtcgatgtcattgtcgactacattggtgcgggctatttccaggataacctaaagagcgcggcactggatggccggattgtgaaccttgcgttcttgggtggaatcaaggttgagaatgtggatatctcgtacttcttgaggaagagaatccgctatgagggaagtacgttgaggagtcgggacgaagagtatcaaaggaagttgagaaatatgcttgttgacaatgcgctggagaagttgcggaataaagaattcaaggtgtttgttgagaaggtgtttaagtttgatgatgtggttgaggcgcataagttgatggagagtaaccaaactaaggggaagattatttgtaccatttag

SEQ ID NO: 27549 - DNA, 993 bp, Emericella nidulans
tccaagcaccgcgaggaagaggctgttgttgcgctatcgaaactacgaagacttgaccccaatgatcccctcatcaaagcagaggtgctggaaattaaagccgctgtcatgttcgatgaagagagtgatcgtgaagctgttcagaggggtggtaaactggcgccatggaaggccgtttttgcgccgaatatgttcaagaggctggtgttgggctgcggtatgtcctctgccttctctttatttctgacggacgctgacgctggccgtgaagggatgatgatctgccagcaattcaccggtatcaacgccgttctgtactacgcccctcagatattcgcctcctttggcttttcctcgtcgaagcagacccttctcgctactggagttaccggtatcctacaaatcgtcttcaccatgccggccgttctcttccttgacaagttcggccggaagaccttcctgatcgtcggtgctgctgggatgttctgctgccacatcgtggtcgctaccgtcgagggcctgtatgaggatgactgggctctgaatgagggtctatacaaggcgcagggatgggtggccattgcgttcatctggctgtttgctgtcaactttgcgtactcttgggagatcttccccaacagcgctcgttcccgaggtgtctcgatcgtcgcatccaccaactggatgttcaactttgtgattggcctgacaacgaaggacatgctaaacagcatgaagtatggcacgtacattttcttcgcgatcttcagtgctcttggcggcgcgtttatttggtggtttgcgccggagacgaaggacaagacgctcgaggagctggatatttattttggtggtacccaggaaagtattacggaagcagaccgcgcccgcatggcgaggatcaatgagcagctgggtctcagcggggtggagaaggtggaggatctgattgacgagaagggaggcgcgcatgatgagttgagggagatgtag

SEQ ID NO: 27550 - DNA, 1041 bp, Emericella nidulans
gcccagttgccagggacagaggtggtcaactatatgcgctcggctgcttggatctactatcgcgtccctccgtcgaagcacctgggcagggagacagatgaggtcaatccagcctacgcggaggaggacaagaggaagtttcaagacccgcatgtgcatcgcgagtacaggaagggaatcatcaatcggacgaacaaggcctttaagctgttcctcaagggagagaataatgaagaagcagtccgctttggcactgaacaaatggcctcgaagctcaactacgaccctgagttgtgccgcaaactgatccccaaatgggaggtcggttgtcgccgcgtcaccccgggtccaggatatctggagtcattctcgagacccaactgcagcctgagtgatagcccaatcaccaagatcacatccaacgcggtgcatactgcggacggcaaggttttcgagtgcgacgtggttgtttgcgcaacgggattcgatgtctcgcaccgtcccaggttcccgctcattggattgaacggggcaaatcttgctgaaaaatgggcagatgaaccagagtcgtatctatcggtggcgacggctggattccctaactacttcatcttcacgggtccaaactctctcggtgggcacgggagtctcgtcgaagccctgaactggacaggagattactttgtgaaatggatcaagaagatcgcgacggaggacatcaagtccgtggttcctaagaaatcagccgaggaggcattcgtgcggtatggagacgaggtgcacaagacgatcgtctggactggcggctgcaagtcctggtacaagcgcaacaagacgaacggccgggtgacggcactctttggcggctcggcgctgttgtttaatcggctcattagcgagttacgcccggaggattttgagattgagtaccggagtgtcaataggtttcggtttctggggaacggattcatggagtatgagactgacccggagagcgatctggcgtggtatgtcgaattgccggagcccttacgggcgtaa

SEQ ID NO: 27551 - DNA, 582 bp, Emericella nidulans
ggcgcgcatctagcgacagaaaagttccttgcggaacttgtcagcaccagtcccaggccaattacgtacacctctatccgggaaggcctctactctgagtccttccccatctacacaaattggtttgatctgcacaaccccgtcgacgaaattaccatcccgcatgatgggtctgggcctggcgttgcgtgggtcaagcgtgacgaacttggcgaggctacggcgaaactcgttgccaaatatgctacgactacgaatgccaatgttgcggctgggttcccgtatgtgaacaagattgtcctgcttacggggcctaagatttactctctgaacgaaactgcggagattctggggagggctgttggtaaggatgtgaaaatccgggaaatcagcgtggatgaatatgcaaagctcgatcataaggggagacatacatatcacggcgttgatttggcccgggaatgggcaacagcctgggaagctattcggcgcggtgagacggctgttgtgacgccaaccctcaaagaaatcttgggcagggaaccggagcagtacgaggtgactatccggggcatggtttag

SEQ ID NO: 27552 - DNA, 570 bp, Emericella nidulans
gccgccggtgggggtagaggaaccggcttcattagcgggcccggcggcacacttgaagccctcaacggcgcccacgccgccaacgagctcgcagacctcaccaacgctatctccctcaccgatacccgtagccgcctgaactccgactcatccgacactgaacatggcactgcgtctgccgtctccgtcgcaagcagcagcgccggcggtggtacacgcggcgtccccctccgcatcaacaccaatatcttttcccgccgccagggccgcgagcgcgaggactccatcagtaacgctagcacatcgtctgcgtcggctactagctacgatttctctgattctgagggtctgcctggtgatatggcgcggtcttcacgccggaggagaggcacgcatggcgataacgaggtttggacaggagatctcagtagtgtgattggactgcagaagcgtgggctccgcggtctgatggagggccggcggttgagagagcggagcgcgaaaccccccagctcgggccaggcttcagttgcggcggtcccagtggatcatactgtcaatgtcatttga

SEQ ID NO: 27553 - DNA, 1050 bp, Emericella nidulans
agcgcgtcgagaatagggcgaagcgcggtgaaagcggccaaagggcaagcacccgggccgttacgggcacccaaaaccaccaaaaccagcccagcaccgcggcagacaagccctcggttgctcaaacgcgcgaacccgcacctgcaaaatctcagctccgactctgcaacggcgttgcaagctcgcatgtctcctagggcaatgaccgtcttaggcgtcagcgccctggttataagcacctactgcggctatctctacgcctcataccgtcgcgaggtgaaccaagcgcagtccctgactgttccagaggacgtctctgaccggtataaccataccgcgcggacgttcgacgcggacgttgagctctcagagaaactaatgcgcctgggcggaaccgcgactcttgtgcggcaggcgcgagggaatgtattggaggtcagttgtgggactggccggaatctggagttctacgaactaggagagaaacgggggattatcgatgaaaagagtcaagtgggcgttcgagggtgccggaccgttacatttgtggatttgagtccggagatggtcgcgattgcgagggcgaagtttgagaaactctatcctggtttcattgggagtgagaaggttcagttccgcgcgcaggatgcgagggatgttcctccgccgtcattgtcggcgtcgggttcggtactgccatccgagtcgcaagggcaagggcagggtaaggggcaagggtattacgacacgattgtgcaaacaatgggactgtgctcgatgccggaccctgcgggggccctgcggcacctagggacgatcacagaaccgcagcatggccgcatcctgctcttagaacatggccgatcgcattacgactggctgaatcgcgtgctggataatctggcccccgcgcatgcggaccgacatgggtgttggtggaaccgtgatatcggacagattgttcgagatagcggcttggagattgtcgaggaggagcgctaccatttcgggacaacgtggagatttgttttgaggcccaagcggacgtag

SEQ ID NO: 27554 - DNA, 699 bp, Emericella nidulans
tatcaggaacccacctggtcgcccgccgacacaccagcgcttacggccgccctacgcaggcttgtcgacaaagtccaggaatggcgaaagcaggtcgaagattttgatatcttgatagccgcacgccgagacctgctgcacgaagacgacgtacgtaccaaccaggcagaacaaaatctcggaactcctgctcctcgcagtacggaacgatactcgtcaaacacaccgagaacgccgccgctgggttttgaccaagggacaccacgtggcagacgcgacctgcggaacctgacatcgccacagcgcagcatcgtcgggtcgcctttaagagaggttacggtaaacaaaacccactcgcctcctccccgcgacgcttctgaggctcgttctgcggcggaagagctgcgcaagcgcctagcggcaccgttcttgccagaaagcaaagttagtacattcaacgaccgcaccgacaacagtgcgcaagagccatctccagcagatcaagaggtagcggtcacggacgaagaggagcggaaaccgaaagctgagaccgcaagtctcggccacgtcctgaccaacgttgtgatcctgtacgagtttctcctggagatctcggcagccgtacaggcacgcggcgctatattcgaggaagcgggcttccacggtgtaggctcgtctctgccagttgacgattcctga

SEQ ID NO: 27555 - DNA, 1017 bp, Emericella nidulans
accaagcccacgccgtccatgcttgaagcgatctgtcagacaacactcctagacgatgttttcgaggaggaccccgtcacgaacgaactgcaaaactatgttgctaagcggaccaaccacgaggctgcgctattggttatgtcgggtacaatgggcaaccaggtcgccattcgcacacacctgaccgagcctccatactctgtcgtttgcgattaccgttcccacattatctgctatgaagcggggggtgtcagcgcatggactggggctacggtgatcccggtcattcccaagaataacacctatcttacactcgaggatgttcaaaagaaagtggtaatcagcaaagatgtccacacgtgccccacaaagttgatcagcctcgaaaacacattagacggaatgatcatgccgttagaggaagctcgcaggattacagaatgggcgcacgaaaatgggatcaaggtacacctcgacggtgctaggttgtgggaagccgttgtttccggggcaggcagcttgcccgaatacagcagcctcttcgacagtatcagtctatgcttttcgaaaggcttaggcgctcccattggtagcatcatagtcggctcggaacttttcataaagaaggcgcgttggttccgcaagtcaattggaggaggcgcccgccaaaccggtgtgctagctgcagccgcaagggttgcccttgatgagacttttgggttagatccctccggcaaggatgggaagctgcgagagacccatatcaaggcgaagcgcgtcgcggacatgtggacgaagcgtggaggaaaactagcctatccggtccaaactaatatggtatggttggatactgaggcatccggccttggaccgaatgacctagcagaaaccggaaaagagaaaggattgaagctcctgggccacaggattgttatccattatccaagccttatggtagccgataattctggtccgctctcactctctgaaaaacttagcaaagatgctgtgcaataa

SEQ ID NO: 27556 - DNA, 432 bp, Emericella nidulans
tgccagaaccgagttatcttcaagcagcttctgcaggccggcgctctgacggttctgcaggcggacgcttgcagagtcggcggcgtcaacgaggtcctcgctattctgctgcttgcgaggaagttcggtgtgccgattgtgccgcattccggtggcgtgggcttgcccgaatacacgcagcatctgagcacgatcgactatgttgttgttagtggaaagaagagtgtgctggagtatgtcgaccatctgcatgagcacttcttgcacccatccagtgtgaaggacgggtattatgtcacgccgttggagccgggctatagcgttgagatgaagccggaaagtatggatcggttctcgttccctggagaggaaggggtgagttggtggaagtccgaggaggcgaaggttattctggaaggacctaggatataa

SEQ ID NO: 27557 - DNA, 1332 bp, Emericella nidulans
gcttactttcgcgcattgagaacttcttacatctttcaaggagaaagaggttcctcatccaatcccgaggaagttatcttctcaacacttatggaattagcgagtaatccggaagacgatcagcccccctcacctccggagggcgtccatacccaagaaaggcagcaaccgaagtactcccagatgatgagctccctggtggaccaggtcaaagccgaggttgaagaatcgaaacacgacaacgtatttgaagcatatgtcaagggtgtgcaaggacataaggacaaggtgcaggaattgcaaaaggaacttctcacaaagctcgctgagcttgagaaagaggagggcagcaaaatcacaagtgaatctattcatacaggctttgatacctcccacgtatctaaggctaaggctaaggataaggtgccagcgtcagagagagctacttcagtcgagcttctgaatccgaaggcggcaacagaaccttcaaatcaggagtccaatgacaatgaggctgtcgacgacccggatagtatacaagcaagtgcgctagcgaagaaatttgcgaagattgaccgcaatgactacagagctctgcatcaattcatatcagaccatccggaaatcgttgcggagaaggaaacagacgggttactggttgaagcgttcaatagccagatggagggcaaagaaacctatgctcgtcatgtgtacaccaaggacttttattgcaatactgccgctctctcggtcctgatgggatttcgcttttcttcaagcgggaggtataagcttgcagggtggttactgattgatccctggtatagtatcacgacaagggagcaccaggcaggtacccttttccgaaacgatgtcaacgaaacctataataagatcaagactcgtgccgctgaactagccaaggatagctctgcgtccaacgatcctgccggggtggagcagatacaacttcacgctgtcgatccgaacacgaagattaccattaacatccctcggagcgagagcaacgaacccgtcgaaatcgaagcgcgaaagatttttgagtctttctctaaagaactgcaaacagcgctggagtctgaatcattagatgaggttaacaaagttctcgggaagatgagtgttgaagaggccgaagatgtcgtggagaagctcggagagagcggcatgcttagtctggaggaaggtatcgtcgatgccacgacggaagagggcaggaagaagctcgaggagatcgaagctgagggtaaaaaggggaggcaattggagaaagttggtgaacctggagggactgtaactgagctggattga

SEQ ID NO: 27558 - DNA, 540 bp, Emericella nidulans
gagggaactatgccagcaaatgagtatgtgcggcattttgagaacgcggtcgtccttctcactggtgcaactggcagcctgggtggctgcctgctctataagctggcactacgtctgccgacaaagaagatctatgccctgtgccgaggctctgttggtgagtcggttcgcaagtgggagtctaccatgccgcagcagatcgacgaaattctcgacactggcaaggttgagttgatcaccggcgatctgtcgaagcccggcttgggcttgaatccagccattcgcgaggagatgcgcgaggaggttactgcagtgatcaatacggccgcgaacatctttcttgtcgaggagctgaaagactcagtgcgagacaactgccagactgcaattgcactgttccaggaggtgtctgaattccgccatgtcaggcacttcatccaattctcaagccttgccgtcaatgcatttctcaccggaggtctcatcgaggagccgctctattccccaccacgcactgtggacgaggaggatgatcgttaa

SEQ ID NO: 27559 - DNA, 468 bp, Emericella nidulans
ctcagcatccccgcaacaaagggtttcgagattggctccggcttcggcggctgcgaggtacccggatctattcacaacgatcccttcgtggcctccgaggtgcagacgcagcttggctcccaaaatacaactaagcaacgcctggtcaccaagaccaacaactccggcggtatccagggtggtatctccaacggtgcgtccatctacttccgtgttgcattcaagccccctgctacaatcgggcaagcgcagcagacggctacctatgactttggcgaaggcgttttggaagccaaggggcgccacgacccctgcgttgtgccccgggccgtccctatcgtcgaggccatgtctgccctcgtcgtcatggactccctgttggctcagtatgcgcgcgagagcgcaaagactttgctcccgccattaccaaagacgatccctactcgccctaccacggggtcgaattag

SEQ ID NO: 27560 - DNA, 696 bp, Emericella nidulans
gcgcttgcgacagaatgccagaaacttctgggcgtaaaaactggtgcagatgccccttctccaacggctgcggtcatattcacgcccaccaacggagaaataatcgatgccagcgtcgacaccagcgcttggacagtcaagctaagcaacaacctcgtgcggcgactgaagtggcagcacgttcgcacgctcggtgtagttactttgacagggcagctgaaggcaccggagcctgtatctaccgacgaagacgcaataaactcgcccaacaagaagcagaagctagtcgaagaaacctcgacccctgaacaacccacaccaacatttcaaccccaacctaccgagccacaacaaacaacagacaaacctgacaggtatcccgtcctcgacatcctcccgccaaatatggcttctgggacaagatcaatgacccgaccactgcacgtcggcgatcttcgcctggcggacctgcgcaagatcatgcaaaacgccggtcataaggcagaattccggggtgagggaacgctcctcattgatggtttcgttgccgttcggaagtcaggaaccgggaaaattgagatcgaggcagctgcatatcaggctgggcctagtgcgggctttgcgcaaggagctggcagcttccttgctgtgaaacagaagatctacgaagggcttgctgttgtggcgggcggttag

SEQ ID NO: 27561 - DNA, 591 bp, Emericella nidulans
gacgtcatcaactttatcagtaaggatcaggcgttccccgacgcaccggaacaggacaaggatgccgtatggcagtggggtgacaagtactacgcaaacggtcctcggctccatgagtatctgcagggtattgggaagatacttaaggaatacgacacctttagcgtcggggaaatgccttttgtaaaggataccaatgaagtgctgaaagcggttcgctacgaccgcaacgaaatcaacatgatcttcaattttgagcacgtcgacattgaccatggcccctggggcaacaaattcaagcctggcggctggaaactcactgatctcaaggcctttttcgagcgctggcaagttttcatgtacgacaacggcggctggaacgctttgtattgggaaaaccacgaccaaccccgatcgattgaccgctatgtcaacccccctcaggctctccgaccagcggccggaaagatgttggctaccatactagccttgcacgcgggctctccgttcatttaccagggccaggagataggaatgggaaatgtcctattgaatggggaatggaagaaatacaagacatcgactgtctga

SEQ ID NO: 27562 - DNA, 792 bp, Emericella nidulans
atcgtctccccgcatagagatgtcacgtatatgaagattggcggcgaacttaccgttgacgagcgtaaccttctctctgtcgcctacaagaacgtcgtcggtactcgacgtgcctcgtggcgtatcatctcctccattgaacagaaggaggaatctaagggctctgagcagcacgtcagcattatccgcgagtaccgtcaaaagatcgagaccgagcttgagaaggtctgccaagacgttctcgatgtactggacgagtccctcatccctaaggctgagacaggcgagtctaaggtgttctactacaagattcatattcagcaattgaatgaagtgtctgatgtgataaataggaagggtgactaccaccgctaccttgctgaattcgcgtctggcaacaagcgcaagcttgccgccaccgctgcccacgaggcttacaagaacgcaaccgacgttgctcagactgagcttacccccacgcaccccatccgcctgggacttgccctgaacttctccgtgttttactacgagatcctgaactcccctgaccgtgcctgccaccttgccaagcaggctttcgatgacgctattgcggagctggactcactttccgaggaaagctaccgtgatagcactctcatcatgcagttgctgcgtgataaccttactctgtggacttcgtccgacggcaacgaacccgagaacgtgtctgcccccaaggaggagaagcctgaggaggacgctgctgctcccgaggagaagcccgaggaagccaaggctcccgagtcgtaa

SEQ ID NO: 27563 - DNA, 627 bp, Emericella nidulans
actctttcaaagttgcaaggggtcaagctccccgcatcggccgacttccacgtccacctccgcgatggggacatgatggaattggttacccccaccatcagacaaggtggtgtcaacacagtcttcgttatgccaaatctcgtaccgccagtcaccacagtcgaccgtgcgctcgagtacaaacagcgtctgcaagcgattgagccggacgggaatttccttatgtctctgtacctgcacgagtccatcacgccggaaactatcatcgacgccaagaagcgcggcattacgggagtcaagagttacccggctggcgtgacaaccaactcctctgccggtgttgtcgactacgagcagttctaccctgtattcgccgaaatggagcgccaggggatgatcctgaatttgcacggggaggttccctctcagggtgatgtgaccgtgctctcagccgaagagcgcttcctgcctaccctcgtgcagttgcatgagaagttccccaagctccgtattattctagagcattgcaccaccgctgcggcagtggaagctgttaagaagtgcgggccgactgttgcgggaacaagtaaatcgtacctcctgggttccacgtgcaatattgtctga

SEQ ID NO: 27564 - DNA, 339 bp, Emericella nidulans
gcagagcgcttcgccgcacaccgcctttcctccgaccgcgtcaaggccgctgtcgcagaactgggcttgcagcagctggcctccaaggtcgagaaccaggctcatgccatgacagccatctggctgcctgatggactggccccgccagatgtccttcctggtctgctgaagcgtggagttatctttgctgcaggcctgcacaaggaggttgcaacaaagtacattcgctttgggcacatgggtgttagcattatggaccccgctcgggatgacattgagaaggccattgcagccctcaaggaggccattgccgatgcgaaacgtgctaagggtctgtga

SEQ ID NO: 27565 - DNA, 273 bp, Emericella nidulans
cgcttcgctcctttcctcctgctggcctccctggctacagccagtccactccttgacaccaatactgaggtgactgatatcgacgtcgttaccagcctcaaggatctgaaacccgttgctgagctcgtcaacgactccaacgttctcgaagcccgcggctcaaccccctggcacaactgcaagtgcttcaatggatacatcaccgacgagaattactccggcgtctacgagaaaactctcgcttacgaaggcaactggtactgggggatctag

SEQ ID NO: 27566 - DNA, 1047 bp, Emericella nidulans
ctacaaccaccaaaatcttcaggcctcaacgtaatcgcccttatatcaggtggaaaggattccctctactcaatcctgcattgcatccgcaacggccataaagtcgttgcgttagcgaatctccatccaccgccaattcctgccattagtagcaatagcgacaatgattcgatacagccagaaacagcagacgacatcgacagcttcatgtaccagacaatcgggtggtctgtgattccactgtatgaagaagcattggggattccgctttatcgcgccccgattataggaggagcggttgatgcgggaagggtttatcgcaacacgaacgatgctgcttctcctactacaaaacttgagagtgctggaaaggatgaatatgaagaagaagacgaaacagagtccctcattcccctcgtacgcaaagtcatggccgcgcatcctgaagcgaacgccgtctgcgcgggagctatcttgtctacgtaccagcgcacgaggattgaagatattgctagtcgacttggtctcgtcccgctcgcttggttgtggcaatacccgttcctcccagctcccgaggcacggaggcagctcgggggtgaagaagatgaggcaggcttgctgacggatatggcggctgtggggtgctcagcgcggattgtgaaagttgcgtctggcgcactggatgaagagtttctgtggggtgatgtttcggatgctgggggtggcttacggaggaggattgtcaagggtgttaagaggtttggaatgggtgggggtgaggatattcggggcgcagtgttgggggagggaggagaatatgagacgctcgctgttgatggccccgagtttttgtggcgagggagaatcgagattggggaagaggggagggaggttagatctggggaggggggtgttgggtatttaaggttaaaaggtgcgaaggttataaggaagagtgaggatgaaagtgatgggattacgccggaagatgtgagaaggccggaatttttggatgggaggtttcctgcggctttgaatgccttgtag

SEQ ID NO: 27567 - DNA, 573 bp, Emericella nidulans
gcgcagaacgccgaagcgactccaaagagacctaagggtattctcaagaattctagttctcaacagctactccacgttgcacctaatgaccctcaccatacgccctctccaccgccggcagatttcaaggaacttacactgcaaaatacccttgtaaacgccggtcgccgcccttccgcctcctcgcgccgcacttctctcgccagcgcccacggccaccatgacgacgtctcgccccgccttaagtgggacgaagccaatctgtatctaacggagcaggagaagacggcaaagatgaagatcgatgagcccaaaactccgtatgctccgcgctatgatcccaccgaggatgaggaggagatgaagcttgcagaagcgcaggagagcctgattaatgcgcagggcgttgttgtggatgagctagacaagaataagaaaggctcttcgtcagcctcacacaagaaggtttccgaagatgacattcctgaactggagttgggagagcccgaggaggagatttcgcaggggacgcatcttgggagccgcgatagaatacgcgtgcgcgcagcttga

SEQ ID NO: 27568 - DNA, 957 bp, Emericella nidulans
atttttgaagaggggacctcgtatcgtctgcgcttggtgaactgtgccattgacacgcactacaagttcatgattgacagtcatgaactaaccgtcatcgcaatggatttggtgccggtcaagccgtataagacgacggctgttagtcttgcgatgggccagcgctacgatgtcatcgtcactgccaaccaacgctcaaaatccgacagtttctggttacgttcgatcccccagcaatcctgctccgatgtcgaagatccaggcaacatccgcggcatcttctactatggcgatagaccgtccacaccaaaaaccgagccctacccctttgaagacagctgcatggacgagcctatggccagtctagttcctcatgtagcacgagacgtgcaaccgccagactatcagaataacgccctcgccagcgtctccttcaatgaagaccacttcttccgctggttcttgaattccactacaatgcaggtctactgggaagatccgacgctgctgcagattctcaacggcgatgattcctttgagaactcctccgccgtgatcgagctccccaacgcgaatgaatgggtctacatgatcgtgaacacaacaatccccgtctcccatcccatccacctacacggacacgacttcttcatccttgcgcagggcacaaatccctgggacggaaagtatcagacatctaatcccccacgacgggataccgccgttctcccggggaacgggtacctagtcatggcatgggagacggataaccctggcgcatggctgatgcattgccatattggctggcatacgacggaagggtttgcactacagtttgtagagcggatcgatgagattcgggaaaatgtcgatagagattttgttgtcaatgcgtgtaatacgtggaatgggtatggtgaggagtatggggttgagcagtatgattcgggtgtctag

SEQ ID NO: 27569 - DNA, 1104 bp, Emericella nidulans
gcgtctccaaggcttccgttcctctacccgaacctgatgcgcgcggtcaagtcctgcgaaccgtccacgcaccgctcccttcgcgtgccctcgaatgcccgcccgccccggggttcgcgagctcccttccataccactcgacgacgtgctcagggctccatacaacgacggtatgggccggcagtcgaacctaatatcccgccgccgtcccggttgaaggacgagagcaccccgggtcctagcgaggactctggctccaagtcaccgtcggagaagagtgctgcttcttcaactccagagcaggccaaatctgggtcgcagtcggaattgcaactacctcagtccacggaggacccctctgctgcttctcagcaatcggcaggtgagaaaagggcggagttgattgagaataagacttcgaatgaagaagaactggagccggaagaagaagaggaggaggaggggggggaggaagctgcgccggaaattgctcgtggaaagcaacagcaccctaaccctgaggaaaaatatgctgaagaacaatccaaatcgccaatattggatggaaacccgctagaaggcgtccttcatatgccatcgccctcatcgtaccttactccttcaacgttaccacacaaccggcccccgcacatggctccaccaccctacgtccaccactttgatacctactccctcgtccaggacctcgcaaagggcggattcacagataagcaagctatcacaatcatgaaaggcgtccgcaaaatccttcaaaacaacctggacttcgctaagcaaaatctcacctcgaaatccgacgttgagaacgaaacatacctcttcaaagcagcctgctcagagcttcagtcgagcctacaaacagctcgcaactcagagatacagcgccagcgcgcctctcggaccgcattagagcacgaggcagatatcctctcgcagcgaacgaaccaggaacttgcaggactcaaggatgatatcaaggggatgttcaatgaccataagatgacagtgagagagttacagcggagcatcgatacttctgttgaaggtcttatgagctcccaactccagctatcacactattga

SEQ ID NO: 27570 - DNA, 1008 bp, Emericella nidulans
tgtgtggacgtcgacgatgagaggcatgatggcggtcgacgacagattatcaacttcgctcccttccgaaacggcactccagctgacaagcacgccgtggccatgtccgtcgtccatgccttcaagacgtccggattcctttacctgaaaaatcatggcataccgccatcggtaacatcccgagtattcaagtcctctgcatccttcttcggcagaccccaagaccaaaaagacacattaggctggacaaccccgcaggcaaaccgtggttacgtccgcacgggccgggagaagctaagtacggttgatgaccaggcagaccgcacggtcccagatatcaaagagagcatggaaattggccgcgaggcgtggaaggtctcccaaacccttgacgaagagggcaaagacttcaaaaacgtcatgcttgagttctttgagatgtgcaaggagctgcatattaaagtcatgcaggctattgcgttggggatgaatttacccgtgcattttttcgatgagtacgtggacaagggcgataataacttgcgtctgctgcattacccggctgtgcataaggatgtcttcaagaagaatcctggacaggtcagagctgcggaacatagtgattacgggtccattacacttctttttcaagatcgacgaggtggcctgcaggcgaggagtcctgaggggacatgggttgatgtgacgccattccctgatacggtagttatcaatgcaggtgatttgctagcaaggtggtcgaacgacacgatcaagagcacgaagcatagggttattgagccgccgaaagtgcctggcgcggaggatgatgacactgatatgtacccagagcgatacagcgttgcgtacttctgcaaccctaacatggacaaattcatcgaggctatccccgggacatatggcgaaggggagggccttagcaaggcaaaataccccggaatcacatcaggagattacctagtgcagcgtctctctgcgacgtactaa

SEQ ID NO: 27571 - DNA, 1809 bp, Emericella nidulans
gcgtacgatggctttcagcctggtttgcatccttatggtcagccagacaatcccaatcctatgaacacatcggaacaccgtccttctttcgagcctccatatccgtaccagcagaactcggactatctcagtatgcctcaaccacaagtccctccccagcaagcccctcccccgcagaccgctgcccagggctactatcctgaaccgccgcgtgagcagaattcctggccacctccaccacctcctcagacaggccgaatcaacgatgcagtgacttctgccgtcggaaacacgccgcatactccgacaatctcacacggcacgcctcccccctctactttccagccgccgcctccgcctccacctccacagtccgaacagcccgatgctccgtctcagcaatccaggttgagcgaaactcctcctcaggagaagtcgagaagagaatcacccgctagccaaatgagcgacagcggtcagaaagctgattcccgcccgaaaccacctatgagaactgatacgtttccgactactctggagaagatatggggaaagctttttgacgacggtaagccaaccgaaaggcttgggcagttcttgcggggaatcgcaatgtacttgatcgagcattttccccccggagacacgctcgttgtagttcctgagaaactgcagaaattctatgctgataccagtattgcaagcgacccgtatccttgggaagatattttcgatgaccgtacatcctcgatttcgagactatttcgggatttccaaatcgaacaccaccttgtacaggtcaggttggacgaaagacctgacgtgcctgcgctcacacccaagggtttcgagcttttcgttacgttgatgatccaagcacatccggacaaggaatatgaacggatgcaaaaggccgtgttgaacatgccaatcagcaatccagataacaagaaagagcggtttcccaaggaaataccaaggcggctattccccgagataccagaccttgttctgcgcgaaaagcttgacgaaagcatcaaaaaacactgtggcgtggagctgccgccaattactgaggatgatgttaagaaggtcgccgcattgcgtgccaaatcgtctacaagcacgactgttgctgtcgaagaatcgaatccgtcgacgacccagcgggagaagaagccataccaaccgccaacatcagcagttgtcgacgacgaggacgaagaacaatctccccccgctattgagcggaaacggaaaccttacacagcgcaaccaggaggaggaaaggtctacgaagggccgggctctcctgtacatcgacacgcaaattctttctccacgaactcaagtaacaaagagtcgcggccctctgcgactcgtgtccctgactcacctccctaccgatctagagggacttcgcgcacgagaacaggagcatcaactaggtcacgaagtcggtcgcgcttccgttcaggccatgagtacagacactctgaaagcgatctcctgaatggctctcgtaaacctggagcaacatccagcggggattactactatgacctgccatcgtcctcatccatcccaagtgatttgctagaccagtatcgcgagcttgaccggagcgcggaagaccataggctttacgaacaaatccgtgagcgcgagaaagagcgcgagaagagcaagtaccatgatagcctcccatcgcggtctagctggtcaaacgacgatgattactatcgtggtctactcggtggacaaggtggcgggccagcatcggggtatgactacaaaggttaccggtaa

SEQ ID NO: 27572 - DNA, 423 bp, Emericella nidulans
gccaatggcaagaagctgccacttgagtctctagaactggatcgccgtatcgtttcgcgagtcaggcaacgcgtcgtgcttgccgcccgtatcaccgactccaacatcgcgaaagagaagatcaccacagaggacaactggctccggaatgctgctgaagacctcggtgtcgagtatgacagtgacgaattcgaccaggccaagggatggggtcgcgggcgtggtcgtggacggcaagaacgtgaccgacaagtcggcagcacatccaaggctgagctggccggtcttcgtgccgagttgaaggaactcctatcccagcgggtgaacctcggggtcagcgaacggtatctcacttccgggcgggttgatattgaggcgttgctacgtgaggagggtaacactcttttctgggccaaggtttga

SEQ ID NO: 27573 - DNA, 585 bp, Emericella nidulans
accgactacgacgtggtgattgttggtgccggcatctccggcataaactcggcgtaccgactgcagacccaactaccacacctgcgctacaccatcctcgaggctcgcgacaatctcggtggtacttgggacctgttcaagtatcccggcatccgctcggattcagatctattcacctttggctttgcctggcatccgtgggatcaggacaacgcgatcgcagcgggtccagccattgtcaactacctgaagcgtacgaccgcgcagtatggcatcaatcgccacattcagtacggccaacggctgcgcggtgcggactggtcttcagccgaccatacctggtcgctgtcggtggaaaacaccgccgacgagcagatgaagaccctttccgcccgctttatcattttcggcactggttactacgattatcaaacccctctccagacagatatcccgggtctagatcagttcgccggccaggtcgtccaccctcagttctggcctgaggatctggattattctaataaacgcattgtcattattggcagtggtgcacggcggtcactctgctctaaatctggttga

SEQ ID NO: 27574 - DNA, 555 bp, Emericella nidulans
ggcgtcgacgactcctacatccttcccgagtcaaagaaaggctcatctcgtggcgcaatcgccatgatttacatttctggtgttggatgggccctcggctggaactccatgcagtacctgcttacggcggagttattcccgctgcgtatccgcgctatggccacgagcacggcaatgacgctgcactttgcgaaccagtacgggaacgcgcgcgctgtcccgaacatgctcctgcccacgagccacggtgggattgaccccaaaggcacgttttggtgttttgcggccgttacgatcctgggcgggctgtgggtttggcttagcattccagagacgaaggggaggaccctagagagcatggatgcgttattccagttgccgtggtggaagatcggtttgtatggcaatcgcgatgcggaacttcgagatatggagaacgagaaggttggtggtcatgttgatactcgaaatgagatggagatggcgactgtcactgttggggatgaggagaagaaagccgagggaagggctgagaacgtggagagggtccaataa

SEQ ID NO: 27575 - DNA, 951 bp, Emericella nidulans
ctgcagttcaccgttcgtcagctcgccgaagtagaaaacaacatgaacgccaccgaacgcgtgcactactacggcacgcaactggaagaagaagcaccagcccacatcccttccaacccagtcccagaatcatggccgccacacggcgaaatcacatttgacaacgtcgccatgcgctaccgccccggtctccccctagtcctcaaaaacctctcgatgaacatatccggcggagagcgcatcggaatcgtcggacgaaccggggccggaaaatcaagcatcatgtctgcgctctttcgactaactgagctgtcatcaggccggattaccatcgacggcgtcgatatatccactattggactgcatgatctgcgctcacggctagcaatcataccgcaggacccaacgctgttccggggttctatccgctcgaatctggatccgtttaatgagcacagcgatcttgagctgtgggatgccttacgaaaagctcatttgattgactctgacacgaaagattccgcagtcgatgcctcgaatccaaatggcaatgccaacgcacagagactaacgctcgacacggcggtcgatgaagagggtctaaccttctcgctgggtcagcggcagctgatggcgttggcgcgtgcccttgttcggaacgcaaggatcatcatttgcgacgaggccacctcgtcggttgattttgcgacagatcagcggatccaggagactatggcgcagggatttgaagggaagacattgctttgtattgcgcatcgactgaagacgattatccactatgatcgtatttgtgtcatggatcagggctcgatcgcggagatagatacaccattgaatctgtgggagaaggaagatggaatatttagggctatgtgtgagcgcagtgggatctcgagggaggatattgtcggacaggtggagaaagagtga

SEQ ID NO: 27576 - DNA, 441 bp, Emericella nidulans
aacaagccaaaacggctgatctacatctcctccacgctgcataagattgccgaccccaacaacctcaacgatatgttctggacccagcggggggaggcgcagtgggatgcgttcaaggcgtactgcgacacaaaattgcaggtgaatcttgtcgcgaacgttgtggcgaagaaatggaaaggtgtcacctctgttgctaccattcatccaggctgggtggccaccaagcttggaggtgggcaggctcccgatagtctggaggatggagtcgagacatatgtgaagttggcggagggggactatgatcagagcctgattgggccgtattttgatccaaaggggaagctgggcgagcagattgctgctgcagtggatgaaggactgcaggagacggctgtgaagctgttggaggagaagaccggactgaagattcctgcttag

SEQ ID NO: 27577 - DNA, 1008 bp, Emericella nidulans
acagacctcacaccgctatttaccgagcttcttcacaaacaggatgaatacatctctctgtcccgacccctgaccacccaaaccgccgatgaattcctcaaagaagcctaccgcattaacacccatatctcctccctcctttcgcacctgcacaaaatacgcccatcgtttttaagcatttcaacgcacgcatccggcaaatctacacaccgcagctccccctcgaccaccaccaccaaaggcaaagacacaatcctctcccccgacgaactcgacgcagtcacctcctcaacctcctccctcctccacacactctcctcctcaatctcaaacctctcctccgcggagtcccttcgccaagaaacacactcgacccttctcgacaagaaatacaatcgcaagcgctcgcgcgcctcgaatcttcttttccaatgggcatccggctcatccgcgttagcagaaagcgaagatgcaggaaagaaacccgagcaaatcattgaagaacagatcgaaaacaacaccaaggccgtccgtgaaagtgtcctctggtttctgagacgtcggctggaaggcacgatcgagatgcagcgggatatggtggagaagaggattgagagggcgcgagagcgggagaagagcgttctttacaagaactctgcctcggcttcaacctctgccgctggcactctcgctggaagtactcgtagtggtgttgcaggacgaggaagaggggtctcggtttccgccccatcaaactaccccgatgccgcgctggaaatggcagatacagttggtgttggtgcgaaagggaacacgcttgatgcgtccgaagttgcggctatagaagcagagcttacgcccgaacaactgcagcttttcgcggaggagaacgattccatggtgcggtattatgaggatactctgagtaaagtccagtgcgtcctgatttgcccttctttcgttcaagtaaagcaaagcgaaactaatctcttattctttctcgtataa

SEQ ID NO: 27578 - DNA, 609 bp, Emericella nidulans
gagaagactcatggttgggtgtacatgcgatctaagaacaacggaagaagtaaggcgtcttctcagcaacagactacctcgccgtccagcagctcggttcagcccaagcaggctccctccgtctggagcatgacacctccttccgaagcgcctgactaccggcaggagccgaatggctgggaccttgccccctctccggagactccggatttgttcaacacctatcaagctcccatgactgccatgcctggctcagtgaccggaacattggatgccgtcaccccaactacagggaccatcaactctccgtctgaaccgttcgatcttgcgcaagagaatacagccttttctattcaggatatattcccggaaatgaaggctagtgacggtttgttgtttcctggcggagacatggattaccctgatttcatcaacaaccacaacatgttcaatgactttggctacggtgatttcaccatgccgacacaagggttgcaatatggagagacacagcaacctcaatttgaagatgactcggcaggcttcctcctcgatgtctacaacgacatgcacacgtacgggattaaccccggccctggtggtctctaa

SEQ ID NO: 27579 - DNA, 405 bp, Emericella nidulans
ccgccaaagtcaaccgaactctggcaggagggtgccgccatcgagggagacaaggtcgtcagcaacgggaaattcgacgaagaacggatggttgagctgctggtcaagaagcctgcacaataccccggatgttccggtgcgcgatgtatcacggataacatttctgacctcaaagctcagattgccgccaatactcgaggaatcactcttatccaagccctctttgctgaatacggtgtccagactgtccaaaagtacatgtacgctatccaagaaacagctgaaacagcagtccgcaacctcctaaaggacctgtaccaccgattcgaaggtaggcctctagaggctgtggactacatggatgatggaacccctatcaaactcaaagttacgatcaacgtctaa

SEQ ID NO: 27580 - DNA, 459 bp, Emericella nidulans
gatattcttgaagttgtcctcgaaaatcaacatctcaagtttgttcgtcttgatggaacgaccagcgtcgaagaccgccaatccattatggacaccttccatgagaacacggacatcccggtctttttgctctccactaaagctggcggcgccgggatcaaccttgcctgcgctaataaggtcatcatcttcgactccagctttaacccgcaggaagacgtgcaagctgagaaccgcgctcatcgtgttggtcagacgcgtgaggtcgaggttatccgtcttgtgacgaaagatacgatcgaagagcagatctatgctcttggccagacgaaactggctcttgaccaggctgttgccggagaggatggggctgattcgaagaaatccgaggaagccgggatcaaggccgttgaagagatgtttactgcggagattacccaaaaggagaggtctacttaa

SEQ ID NO: 27581 - DNA, 534 bp, Emericella nidulans
cggctcacctcgatcccaatcgccctccttctctcccctctagctcttgcaacgccaaacctcgtcgcagagagcaacaattctatccttaagcgcagcccgtcacccatgcggccactcgtcgctcgccagtcctcggcgtatattctggcccgctctccccaggacgacgatggagtggtctgcgacagcgacgagaaacgatgcggcaatgcctgtgtaaatgaagactacaactgttgtccagacaatgcaaacggcgggtgtccgagcgacgaagaatgtcagagggataacggggtctgggggtgttgtcctgagggcgaggactgtcgctgggatgatgacgacgacgacgatgataggaatatcttcgataggatcggggatggaattgatgatattggcgatgagatcgaggatggatggaacgatatcgtgaatgacgatgacgatgatgcggcagggatgttgaagcccggtgttggcgttgcgttgatggcggctgtcgtggcggcagtgttgccggcgtag

SEQ ID NO: 27582 - DNA, 333 bp, Emericella nidulans
tcggaccctttactttttgaagacaccttcacggtcaccggtgtcaaccaagagaaatatgaccgcgtctcccgcctgacctgcacttcgtccgactctcagaccacatttaccctcgatatcaactctgagctctacccttgcactaccggagagtcgctttccatggccctcgcttcgactctctctttagacggcaaggaggacggcgcaaagaccggctggagggaagtaggaatgggcgagcagacactcgcaaatgactacgactatgtctgccacggaaaggtctaccggtttgaggaggcctcggattctcctgggaacatgtaa

SEQ ID NO: 27583 - DNA, 1044 bp, Emericella nidulans
tctcccacagccattgagaccgtcccgacggggaagaacaactggtggaaagaagccaccatctaccaggtctacccggcatctttcaaagactctaatggcgatggatggggcgatattcctggggtcattgaaaaagtgccctacttacattcactcggcgtggacgtcgtctggctctcgcccatgtacgattcgccgatgctcgacatgggttacgacgtctccgactacgagaatgttctaccagcgtatggcacggtcgtagatgttgagaagctggtagaggaatgccacaagtatgggatgagactcatacttgaccttgtgatcaaccacaccagcgaccagcacaagtggtttctggaaagccgcagcagcaaggacaaccctaaacgcgactggtatttctgcggccgccacgggcaatcggatgcctccgagcaactatcagggggtattctgcagggagtacatgttcgttcactctttccgactgctggacacgcgctgattcgcacagggacgtgggatgagcacacgcaggagtattacctccatctatacgctaaagaacaacctgacctcaactgggataatctagaaacccgcaaggcgatctatgacagcgctgtccggttctggctcgaccgcggcgtcgacggcttccgggtcgacactgtaaacaagtacagcaagtatactgactttccggacgccccgatcacagacccaaagagctacatccagccagccatcggtatgtggtgcaacggtccccgcatccacgagttcattcgtgagatgtacgatgaagctctcgagccctacggagacgtcgtcaccgtcggcgagctcgccaataccccggatccggctcacgtcttgagatacgtgggcgcttcagccaagcaactaagcatggtatttcacctcgacatcggacacatcggcatgggtagcctggaagacaaatacgtcctgcagccatggaagctgacggaaatgaagtccaattgtgccaaaatgcagaccttcaattga

SEQ ID NO: 27584 - DNA, 408 bp, Emericella nidulans
ttcctcgaaatcttcaccgtcctactcccttgttgggaggtcatgcgtcaccagtccctgcacaaggacaccctcgaggcgatcaagcagtgggagatccgcaccaaaggcgccaactcggacagcaagtcgctcggttcgacggccacaatggttgactcgatgatgtccggctggaaatccaacaacgagtccgtcatcagcgacagcagcgcccgcgagagcatccttaacatgagcgccctcgagtacgtcctcgaacgcaacccgacgcccctgcagcgcttctccgccctaaacgacttttccggcgagaacgtcgcgttcctcacaagcatcgccgagtggaagaccctatctgcccaaggcgctgtgcgagggcgacgaggcggccgacgacatctttag

SEQ ID NO: 27585 - DNA, 2115 bp, Emericella nidulans
gtgtcgtttcttcagtggttcgcgttctgggcttttgctggacttctcacggtaccatggttgttctgcgtttacaggatcgtcaccaactcgataggcaagacgcgaagaattcaaaaggtcctcgatgccaaaactgcgccaaaagtcgtcatcatcatgccagtgtacaaggaagaaccggaaacgttgatcaaggcagttgattcggtcgtcgatagtgactaccccgggtgttgtatccatgttttcttatcctacgacggtagcctcattgacgagccataccttcgtgtaattaaccacctcggcattccaatctcacttcggagctatccccaaagcatcgacgtgacatacaaaggagcaaggattacagtttcccggttcaggcatggcggtaaacgacactgccagaagcagacatttaggctcatcgataaagtgtacgcggattacctcaaggagcatgatgatctcttcctgcttttcattgattctgactgcatgctggaccggctttgccttcagaatttcatgtacgacatggagttgaagccgggaagcaagcgcaatatgttagctatggccgggatcattacgtcaactaccgaaaaaaattctctcattaccgtcttgcaggatatggaatacatacatggacaactctttgagcgatcggttgagtccggctgcggcgcagtaacttgccttccaggagcgctgacgattctgcggttttctgcctttcgcaaaatggccaaatactactttgcagacaaggctgaacaatgtgaagacctgttcgattatggtaaatgctacttgggcgaagatcgctggcttacccatctcttcatgatcggagcacggaagcgctaccagattcagatgtgcaccaccgcgttctgcaagaccgaagcagtgcagacgttcaacagcctgttgaagcaacgccgacgatggttccttgggtacataaccaacgaagtttgccaccgcacatggggagggccaaggaccgacgccgctagggccgatgagtttactacccccgaacaagccgtgaggcaggcagaggcacagggagacgagctgaacgtcgaggtagaaacttttcgatcagcagttgaaggaaaaggagtgcctgtccacccgtggaagaaagtcaccggacgcttctcaaatggagatcttatgcctattaaaggagggatggtcaatgataccgaggctggcttgacgaagttcttgtcgccccttccagaaatacctcagattggcctacatccaccgtggtccacagagtccgtactgtcttctgtggaatctatcgagatgccacataacgtcgagagcctgatgaatgacgagaaatattaccttagtcgcaaggctcaagagacctcaacgcctcgtcgcagcgtagagtcatttcacgattctcagaacacaaatgatccccgactaccaattccaagcggtgatggcaaccgtgccatcatagaaaacagattggccagtccagcgccgtcactggattcgacaacaacagcaacagaagccaccaaattctgccgtagattggtaaggcggtcaatgaggggcgtccaggtgtccagcatgagccagaagatttccgtcacaatgtctgtcgtcggtatagattttggtgcccaaagcaccaagattggtgtcgccagaaacaagggtattgacattattgccaacgaagtctccaaccgacagacacccgctagaagcagacacattggtgaagccgcgaagacacaagagacctccaacctcaagaacacagttggaaacctcaagcgcctgattggccgcgctttcagcgaccccgagattcagatcgagcaggaatacagcgttgcacagctttgtgacgtcaatggccaggccggtgttgaagtcagctatctgggcaagaaggagaagttctctgccatccagctggtcgccatgtatctgaccaagatccgcgatatcacctccaaagaattgaaactccccgtcacagatgtcacaatcagtgttccgcttggttcacgacatcagcgtcggctatgtcgatgcagtgagatgctggcttaa

SEQ ID NO: 27586 - DNA, 675 bp, Emericella nidulans
aaggtgggtgtactccggaaggcctttgacttccccggcctctccgctgaagtgcgtgacaccgtcctgcaaaacgcaaaagcatacttctcagccgcaggcgcagacatcctcgaagtatctgtccccatgcaccgcgaagcccctgcaatctggaccgtcgcggcacgaacttcgctagctgattacggcctcgccatgaagccgcccggctacctctcgtacgcccccgatcatatcgatacgcagtggccgccaacccaggagatgtatgattaccttagcgctgggaatccgacgatcatgaatctcatctttagcacggactacctgcgcgagacatttggaacaagtgtggaatttaagggccaccggaaggtcttcgagctccgcgctgcatatgacgctgtcctgtccgatgttgatgtccttataacgccgactgttccgaccgtcgcttttgaattcccatcaagcacaaaggggggcaccgaatggggagatattggggagagagtgacggcggcagtggggttgagctataacacttgtccgttcaacgtcacggggcatccggccatgaatgtgccttgcgggcttggtggtagtgacggtaagaagctgccgattggaatgcaggttattggccagaggtgggatgatgaagcggtgtaa

SEQ ID NO: 27587 - DNA, 1299 bp, Emericella nidulans
aagctccagcttcatctgacgctagcaggccttttctgctcggtcctcgcaatccaagatgttctcagcgaggttaaagattccaggaatgggcttctcgaagctggtgccaaaaacccactcgactcagccctcgagttatcccccacattctcccccgcagagatcttcgacaccaccgagatcaccaaatacctgaatagcatcaacgtcgacaccatccccaacaccgacagctggataagcggttttcttgccagcaatctcttcaacgaaatcaccaatgccccttctgacttcgtcaacgaaatcgatgcccgcactgagactcaccccattcagagcgacaaaacaatctaccagctcatctcagaaagcaaatacaccaatattctcgctaaaattatcgaccaagaccccaaactagtcgagtttcttaactctacccaccacaagatcactgtctttgctccaactgacgatgcgttccgcaagattctgcatcatcatcaccaccgtcatcatgatggccatgacggaaatggacacgaacgcgatggcgacggcgacaaagaccaccatatcccgaaagaagtgattcgctacttcgcgagctaccactcttcccccgagatccttaccgccgcaaagctcttccacgctcatacggtcaatagcgccctgaacgattccctcctcggtaccgacaagcacgataacggtctcccgcagcgtcttgccgtgcgcgctggcttcaaagggctgacaataaacttctacagccatgtcgttgcagcggatattggcgcatccaacggcctgatccacggcctcgactcgattctcctcccgccaccgccagccctattgctattagacatcctccctacaaagttctcaacattcaacctaggcttgataaaaacaggcctaacccagtacctgaacaccacaaaagaagagtcagcacacggcttcacaattttcaccccttcaaaccgcgccttcgaccatcttgggctccggattaacgcgttcctcttctccccatatggcattccgtacctccgtgcattacttaagtaccatatcgtgccgaatcaaacgctttatagcgatgtgctctatacgtctgacggacagattaagccgtttggagtcaagggttcaacgcatttagatctggagaccctgctggacgatcatgagattagcgccgatgtggcgaggttcggcccgtacacaagaatcaaggtgaatggatggcagcgagtagcatttgcagatccctggggatag

SEQ ID NO: 27588 - DNA, 1368 bp, Emericella nidulans
ccgatgccaatgacgctgtatctgtgggcgacggcggctagagtactagaaacggaaggcggcccgcttactgcattggggatcccgccatctactcccattctccaaggtcaaccgccccgcgcggcatccacatcaacatccgcccaacttaccaaggcagcgggtgatatctccagtgtctttcccagcttgaggccggactataaaccggagccgttgccaccgcggtttaaagatctaaaggagcgaatatttcgcagaaacggggatgctttgaagaagagctgggaaaggcttttgcccagtctggaagaggaggtggacaagattaaggcgaaaaagagcggaatcatccctatcgtggattactctgacgttgtttccggtgatgtgtctccggcgctcctggcggagatccgtcatcgcggatctgtcgttatcagaaatgtggtgccgcggaaagaagcacgggcttggaaggagagaatagaggattacgtcgcagccaatcaggataaagtcaaggcatttcccccagactcaccggcggtattgcgtatccgacagcccggcgacagcaagttcactctaggacctcacattgatggaggctcattggagcgttgggaggaccccgagtactccagggtatacgccaaaatcctggaaggcaagtgggaagaatacgacccatgggacgcaaagcaccgtatcgccgcaaatatggatttgtacaacggtgcgggcgcctgctctatgctgagatttttccagggctggctgtccatgtccaagacagccccaggcgaaggctcgctacatgtctgccccatgcttgtgcacagtactgcgtacactatgctcagaccattctttgacagtcagacactacagccagcgatggacgctaccttcccggggtcggtgcctggtgcgtgccaggagtacaaccctattacacatccgcatctcgagctggagacaacgatggtgtccgtccctgaggtagaacctggtgactatgttgcctggcattgtgattctctgcactcagtcgacaaggagcatcggggtaagggtgactcgagcgttctctatatcccagcaaccccaatgtgcgatatgaacgtcgattacctgctcaagcagcgaaaagcggcgctcgcttactccccgccatgggacttcccaggggccggcgggccaggcgaacttggattcaagggagcgttggactggaattcgattagtgctgagggacagcgagccatgggcttgggacagcagcggtgggatatcaccgacgacatgactgaaggagagagacaggctgttgagagggcaaataaggcgtgcttcgcttaa

SEQ ID NO: 27589 - DNA, 1230 bp, Emericella nidulans
gcctcggctcgcagtccacgatggcagcagatccaagacctgatcatgatagcaggcacatctgctaccgcatacttcctggtccgtcatctcctctctcgcctcgatttcgacccagatagacagaaaaaggaggaacaacaacgtaaatcagcggcaatattacggaaactagatggaaatttggatgagaactcatcaggagaatccggagggaagacgcggaaaggtgaccttgtcctcaaccagtacgaacaagcgattgcgatggatgtggtggccccggaggacatacccgtatccttcaaggatataggcgggcttgaagatatcattgaagagctaaaggagtctgtaatatatcccctgacgatgcctcaccttttctcgtcgacatcttcacttctcacagcgccttcgggtgttctcttatacggccctcccggttgtggaaaaaccatgcttgcgaaagcgcttgcccacgaaagtggcgcatcctttatcaacctccatatttcgacattgacagagaagtggtacggtgattcgaataaactcgtcaacgcggtcttttccctagccaggaagctgcaaccgtcaattgtcttcatcgatgagatagacgcggtacttggcacaaggcggagcggcgagcatgaagcgagtggtatggtgaaagcagagttcatgacacattgggacggtctaacgtcggcaaactctttgggcgagccccagcgagttgtcgtgttgggagccacgaatcggatgcaggatatcgacgaggccattcttcgtcgcatgcctaagaaattccctgtcgaactaccaccggccgcgcagcgtttagggattctgagcctagtacttaaggatactaagattgaccgccagaacttcgacctacactacctggtcaaagcaatggcagggatgtccggtagtgatatcaaggaagcttgccgtgacgctgcaatggttccagtccgggaattcatccgacagaagacagcacagggtttgaaaattacttctgttgacccaagcgaagtccgtgggctgcggactgaggatttctttgctagcgccggcggacgtcagaggttcatcccagttgctacgcaaaacataccaccagaaactagctccgaaaaggaatggagcacagaagatgaagcggcctctgagaatggcacacagcagtcccggacgacccaggctgaagcctga

SEQ ID NO: 27590 - DNA, 546 bp, Emericella nidulans
aagcgtgggcgggaatgggaggctgacggtccagtcaagaagcttgcaagtgaagaaaaccgctccaggctggatgagcagatcggccgtcgcgttccatctcctagccgcttgccttctccaggcgagatgcaacggtccgacgttcgccgtgaggatcaacgccgggccaatgaaggctaccatccttccgaagccgctcaccaccctccaactctcccctcaattcagcacatgccgcaacatgcttccggtggcacccttccaccgatggctgagagcgctcccacaccatctaacgggcctgccactattcctcctactactcaagttcaggttcaagtatctgtcaaggaggaacatgcccgggctgaacaagctccagctcacgagcctgctgcacgtaaaatggatgtagacgaggattacgatgacgatggcgaagatgataagaaggctgctgcgaagggtagtccccatggcagcgcagcaggcagcgccaatggaaacagcaatggcgttggcaagtcggaaacagctgcgtaa

SEQ ID NO: 27591 - DNA, 1047 bp, Emericella nidulans
cccctcgtcgcccagaacccggtcccaagggtaatccttgggttgatgacctatggtaaagacgagtcgaaaggcggtcgagttacatcactagaggaattcaacaagcacctggattacttccagcaacaaggcttcaacgaagtcgatactgcgcagttgtacattggaggaacccaagaaaggttcacggcggaagcgaagtggaaagaccgaggtctaacccttgcgacaaaagtctaccccgtggctcctggtgtccataagcctgatgttctccgcgagaagttcgagacatctctgaaggagctcgggacaagccaggtcgatatcttctacctacacgcagctgaccggtctgtcccatttgatgaaacattcgaggctgtcaacgagctgcacaaagagggcaaatttgtgcaactgggattgagcaactatactgcttttgaggttgcagagatcgtcactctctgcaatgagagaggctgggtacgaccgactatctaccaggccatgtacaatgctatcacgcgctcaatcgagactgagctgattccggcttgcaaacgttacggtattgatattgtcgtttataaccctttggctggcgggatcctctctggcaagtataaaacgaaggacatccccgcagagggcagatatagcgacaccaccgcaagtggtagcttgtaccgtagacggtacttccgcgatgcgacgttcgaagccttgtacatcatcgagcctgtaacgcaaaagcatgagcttacactgcctgagacagccttgcgttggatgcaccatcattctaagctcaacatcaaggacggtcgagacggaatcattattggggtgagcaacttcaatcagctagaaagcaacctcaaagatgttcacaagggtccccttccccagcaggtagttgaggcgctagacaaggcgtggttggttgcgaaagcgaccgctccggattactggcatcttgatctcatatatacatatgacacccaggaagcattgttcaagcgaaagtcgaaggcatag

SEQ ID NO: 27592 - DNA, 1644 bp, Emericella nidulans
ccgtaccagccgatgaacgaagcgccgtccccccgcgcgtaccaggacttttcgtcgccaatggataccggggccatcaaccgcaagagaacatattctccactgactccactagatgcgggtgaaaacgcgacagatcctttcaacccggcggtcgtcgctggttcagcgccgaaacctggtaacctcttctgggctggcaatgatagcgatcttcctgccggacttgacattcccgatatgccaaagcacgacgaagatatgacaccgttgagtgtcgacgaaggtgctctcaatgccctatataccttgacgcgagtcgacatcgatcgcctggccggcacgtttgagagggttacatcgtatgacaatgcgcaagaccttctgctatattatactcgacagccggccctagtgcgatcgacaggcgttaacctaatatggctacagagcatactactcatgatcctcgattgcgattcgcgaggacctgataatttcgtgctgaaggatggcatcccaaagcagacattgatccaatctgccaccaagctcggcgcggatttggcgaaaagcctcggccaattgaaggccaaacggactacggatcctgatgttgactcggaagcgaacctcgctaggcgtagttgggtagctttggcaatcctgacacgctggtatgctgttagtgtcgctgacacaagtgttctcggaacgcatgagatcggtggtcgtgaggatgaaagagttgtcggtacagtggcagcagggattgcgtcatattccagctttttaagtgaaatcctcactctagctgcagctgaacctaatgtctgccagtccaacactggcattgggcgggtaatctctgcgaatttggcagcttcattggaacgactttctggacttgatgattttcgaggcacttccgaagatggctcctatggtttcgtcgagagtctgcagaatcagttgtactggacgaccagactcctaatcaaacgacacatcttcgtctacagcccctacgaaatcatattcagtgctgaagaggtcatcaatgagttacacaaggcgacgacacagtctcgtcaatctacccccttcgatcttcacagtctggctttggcaacgatgacacttctagaagcgtccgttctcccggagcatgcgaatgaatgctgggatgctctaagtaaagttgaggagattctcgacctccgccaaaagcgcgctctgcaacgcacagaatttggtgatatcttccacaccgaaagctgggatgcgaagatccgtctcttcctcgaatggaggcgcacgaaatcgcaagaaactcagctccacgatccgaaccttggcaaagccgagtctgcaccgccccctgttgttggcccgaacgaacagcgctccctccagcatcttgcggaccttgctgtcggtgctgagggctctgtagcggcaaatgcatcgccgccacctccctccgccattccgtcgacggagaatcatcacatgcctgctgcatcgccaaatcttgcttcggccccaccgccacagggccgcatagtggtcgatttcaccctcctgacgaaggagggatatctcaacgttttcgccgggttgatctatcgacggtctcggtag

SEQ ID NO: 27593 - DNA, 258 bp, Emericella nidulans
atacttggcggctacgaccgctacggcgaggggaagatctacatcatcctgctcaggggccccgcccccggggctaagaagcgtgacatgaccctgcgcaagaccctgtgcccccagaccagccgaagggctaccgagaaggtcgacctcaagtggatcgacacctactccaagttcggtcacggtgctttccagacgcccgaggagaagcgcgctttcatgggtaccctcaagaaggacctcgttacttctgcttaa

SEQ ID NO: 27594 - DNA, 1161 bp, Emericella nidulans
cataagatcatcgacgcctacgagaaagtcgtcgacaacctcaatgcccacgttcatcccaatgccagataccagccggcaagccactttagaggtctcgtgcgcaaaggcgcggaggtttatggtatgcaggcagtaggagatgacatacctctcagcgaaggcggcgagctgctcctcgagcgaatgcagcattccagcgatcagcccctgtggattctctgctggggcggcaccaacgttctggcacaagtgcttttccgcatcgagaaacttcactccaaggaggaagccgcccggctgcggtcgaggattcgcgtttatgctatatcggatcaggatgacacaggaccctggattcgtcaccggtatccagacgtcttctacattgcttctgttcacggctggaactactacggcatggccgcgtggactgggatatcgggagatagatactacaatttcgaccaaggcgggccagatttcaccaaaatgaccaaggaatggatccgtgagaatatccagataggcgagttgggctccgcgtaccccgactatctcttcattcctgagggcgatacggccacgttcttgtacttgattcagaacgggctgggtgtcccgagcatccggagtacggctcatggggtgaacgactttcgtgcgcgtatacaatggactctttcgccggactttgacgcagccaatcatgctccggttgtctctgtcaatggcgacaccagcctgaccccctttgaggtcgaggccgaggcgggctcgaccttcacactcgacgcatctgagagttatgatccggataatggtgacgttttgaccttcgaatggtttcactataaggaccctagtgcaacacagtggtgggtggatgcagaagtcgcagatctaggaatcaaacctattgatggacgccggaaggtcgaaattaccgttcctccaccagagaaatgctgcgtggagttgatgagcaggcaacctatccttcggggacaggtcctgcatctgattctccaggtgacagataacggttcacctgcgcttacgagctatcgacggatattgattcagacaacaaacccccgactagaagggggaggcaagggagctgatgctgtgggggaccttatggctgagtttgcgtag

SEQ ID NO: 27595 - DNA, 1074 bp, Emericella nidulans
catccatccttaccctctatcatttacgacgcttcccccacggccttggggatttcagctgtcttcggtgcactcttcttctatacactcgtcaaaatgttcggctttctagctcgtgagaaccagtttgttgtggagggtcgggtgagtctcattgtggcatctgtcgtctctgatttgggcattactaacaagttgggcttgcagaccgtggtgatcaccggtggctcggagggtatggccaaggccgttgcctgccagctcgcccagaaaggagccaatattgtcattgtcgctcggacacttcagaagctcgaggaggccattgaagccatcaaaggttccgctgccaatgtcaacaagcagaggtttcactacatcagtgctgacctcacgaaacccgaagaatgcgaacgcattatgaccgaagtcaccgagtggaatgacggcatgccccctgacattgtttggtgctgcgctggatattgcactcctggatatttcgtcgagacatccgtccagacactcaaggaccaaatggataccgtttactggactgcggcaaacacagcacacgcaatcctgaggaagtggcttgttcccattaaccctagtcaccagcggccattgcctcgacgacacctcatctttacttgttctaccctcgccttcgtgcccattgctgggtatgctccatactcccctgctaaggctgccatgcgtgccctttcagatacgctgtgccaggagattgaagtatataacggctctcgcgcttccaaagaacgagcccgtgccactccagccgatgtcaagattcatacggtgttccccatgggtattctcagccctggattcgataacgagcaacaaattaagcctgcccttacaaagcagctcgagtcggccgacaagcctcaaacacccaaggaggttgctcggattgccatcgaagccattgaacgaggcgaatacctcatcactacaatgttcgtcggcgacgtgatgaagggtctgcgcttggacctagccctcgaaattcttggttccgggatacgtgcactggttggttga

SEQ ID NO: 27596 - DNA, 999 bp, Emericella nidulans
gctcccttgccaccagacatcatggcaacccaactctcaacaatatatctactagctgccatgttcccctctccgggcgaactcgaactcgacgcgtcaacaaaggaatgcatcgacaaagtgcgagaatggtgcgaaagcgaagatacatccgcagctgcaagtccatccgctatcccatcaagcattctcctcgcagtgcacgccccgctctcaaacacaaatgggaagactattcaggttaacgtctccatccctctgcattcccaggacagccggacggcagatgaagcacccacaataacatattcccttcggcaaccagactggatgtcgaaagcagaggtggcaaaactggcctctggaatgcccgctggtgacgtctttgcggcgttggagtttattcaagaagctactgcgttcctgggggatctgaacgcaacctcaatttgtgaaaacccctcaattcccactcagagtatcagggagccactcgttcgcgtctggttctacttcccctctctctcaacgcgcgcgaaacgcgccgatatggtcaattatgcgccggactacgggctaacgggcttcgttcttgccgggaaaccgggcgttttatgtctggagggtgcgtcgaaggatattgattcgtatatgagctttatcaagacgcactcgtggggggacattcctgcgcatcagaagaaggttagcgagcggtttcgagagacggtgagcgttgagagagtatttgcgggcatggaggagatcacggacagcctgggggaacggggtgggcagagggcgaaccgcggggatatgcaggcattggaggcttggcttgggaggagagggctgggagaggcttttgaaaagctgtcagccggaaatgatctgtacgcggaggccggagagggcaagacttactgcaagaacaagagcgaataccatctcgtggcttggctgaatataaagaggcagcctggacagggcggtttctag

SEQ ID NO: 27597 - DNA, 351 bp, Emericella nidulans
ggcgaagcctatatccccattgcatttgctgctgccgcagctgccgatccagacgtcaagctctactacaatgactacaacctcgaatacggcggtgccaaggcggctggtgcaagagctattgtgcaactcatcaagaacgcgggcgttaagatcgatggtgtaggctttcaggcacacttcagtgttggcactgtgccgagcaggagctccctggccagtgtgctgcagtcgttcacctcgctaggcgtcgaagtcgcgtacacggaggctgatgtccgtatccaactgccgacatctgcaacgacgctggcacagcagtcgacagactttcagaacctggcgggatag

SEQ ID NO: 27598 - DNA, 936 bp, Emericella nidulans
gctctgaaaacggcttctgggctccggctagtacgacagctgccacgagtcccctcgaacatcctcgacttcccatcagccgcagggactcggcaatgtcggccgattaagatccccagattacgtcctggcaccccggatcttcctgacagtaccgatttcgtgtgcggaacactggatgaggaccgacccttggaggttgcctacaaatcctgcctcgagcagcgacgtctttccaaacaagtcatcattcctcaggatattgatccaagctttcctacctccgacattgacgacgatgacgacgacgatgacgatgaggaggtcaagggctctggcttactagacgaagggcctcgaggtcgatcaggcggggagcaatcacggagggtttcgcctcacccttcgccaaaacgaatgatttcacccccacctcgtcgccatggcagagcgtcacccaaacgtcttcgttctccgccgcctccgatcaagctcaggtcgactgcgaatggtggagtaaaaggcgctcccaccctgcatcatggcctcaacatcagcgagctagtccagcggcccgtgctggctcgcacaaagtcactccctcgcacacccaaccctttcttcgcaatggaaagctctcatcgctggtctggtatcgtgccaattcaagaatcccacgagcgtgaatcgtcacgtaatcgagagatccatacccggggtcctgttgatatcgtcgagggcctagaaaagaaacgccagaagcgaaaagaaaaattttggcgccaacactgtcgcaaagctgccaaagagcagatggagcgacgccctattcccggaaaaggtgctgaacgcatgaaggagcttggtctcgaggtcgctgaaaggacgagagcctttgcgtgcggtgagagctcccagcttgtcctttccgtctag

SEQ ID NO: 27599 - DNA, 1221 bp, Emericella nidulans
gctgctctctacagagccattctgctgctccggagcgaccatggcctggatggcgagcaccacctcgtcccccgacaatcccataccgtcgagaccctcgacggctcgaccaaggccggtttcatcgctatgggcatctgcggcctcgtctcgttcattgcaacactcagtctcctgttgttcttgacctaccgctttatcttctggaaacgaaactacaaacgacctctcgcgcacaaccagtatgtcgttctcatctaccagctcctgctcgtcgatcttcaacaggcgaccgcgttcctgctctgcctgcactgggtgaccaagggcgccgtctactatccaagcgccgcatgtatcctgcaaggtttcatcactgttggactttacgggtccaagacgtttgtcatttccgaggctgcctggggtaggttcacccgccccgcccgcccttgcttctactcccccgctcgctgctaccgttgcaaatccgttacaaatactaaccagcatatcccgtgttggctgagtcctgagcatgaaaatgagcgtctttggggccactacctctggattttcctcgccgagttcggcactgtggtgctctacggtataatgttcttctacctgcgccgccggatggtgcacgctgcaaagctgcggcccaaccatcaggacagcctgaaacggctcaaccgcgtcgttatctacatggtcatctaccccttcgcctacatcctgctcatcgtcccgctggctgccggccgaatgtccagcgcgcgtcatgtcattccgagccgccaatacttcgccgctgctggttcacttatggccttgtctggtctggcggacgcggccgtctacacgctcacgaggcggcagttgctactcgatacggacctcagccagtcggacggcccgtataatcgttatgcctactcgggctcacatacgtaccatacgcaagttacgtctacgactggagggcgtgaaaggaaacgaggtcggttccgaaagggaatgcaaacgttgaatgaaactatccaagatgatcgtgatgattctaccgaggagattgtaaagggcggtcgaaatgacagtggggatgtcgagatggtcaattatacgggtcacggagtgtatcaagagacgacgatcgagatcacgcacgaggtagcggatccccgagagtttccccagcgggaacggcatagtgggtga

SEQ ID NO: 27600 - DNA, 237 bp, Emericella nidulans
ctcggcccggtctacaagacataccgcatccttgacattcaggagggtaccattgtcgctctcactgagtctggcgacgtcaagagcggtatccccgtgattcctcagggcaacctttaccagcgcatcaaggacgccttcctcgagggccgtggctccgtccgcgctctggttattaacgacggtggccgtgagctcgttgttgactacaagatcatccactcttcccgtctataa

SEQ ID NO: 27601 - DNA, 1170 bp, Emericella nidulans
ggtcagaaaacccagcttgacatcattcagaagttcaagaagggtacctataacacgattgtggccacctcgatcggtgaggaagggttggatatcggagaggtcgacctcattgtgtgttacgattcttcggcgtccccaatacgcatgttgcaacgcatgggacggactggtcgaaagagagccggtaatatcgttttgcttcttatgcaaggcaaggaggaagagaactatcttaaggcgaaagacaactatgaaaagatgcaacagcttatagcgagtggatcccagtttacgtttcatgacgatagatctccgcgcatcatacctcgtggcataaaaccagtccctgacaaacgacatgtggacattcccaatgaaaatgaagccagcgaccttccggagccgaagaaacgcaagggacgtgtcccgaagaagcccgcaaagcaatttcacatgccggacaacgtcgaaacaggttttacaaaggcatcgagcttgacagggacatcgaaaccggcagcaaagccaagaacaaaacaaaatgaaactcggaaagctcggataccgacgccagagcctgtgccggttccagacataaatgatgtcctgctcactcccgctcaacagaaggaactagagcagcactaccagaatgtaggaggcactagtccagaatttatccgctatcctcgaagcgacgcctttcccaagctgcagtcaattgggcgaccaacgaagatggtgggccatggctctctcacacagcgtgttgtcgatgccttgcaacgaataaatcagattggggcagactgcgaggagcgcttcaaagaagtattggatcgtgaggcaaagctgtctttcgaagagtcccttctttctagcaagtgtgcaactgctgaacgccgtctgagctcagcaaactccggccgaaaactaaatgcaccccagtttccactcggggattctggagatatcgacactgatcaagctgttgtcagatattttggctatcagcagccgaaaccgtttcaacctccgcgcaaagtcagtcgtatcgaagatgatttcaacttcccaaaccctactgctcttttgacaccggatgccgagcgcagagatcacccaaaacggagaaggattgtgctcgataatgacagtgacgagtaa

SEQ ID NO: 27602 - DNA, 336 bp, Emericella nidulans
cctaaatacctcgagtccacgctccagaagcccgagaaccgcatcgccgtgctcggcggcaccaagtccgcctgggacgccgtctacgcggccgctacagccggcgcccaggtcgactggatcatccgcgacaacggacatgggccctgctggatggcgccgccgtacgtgaccccgctgaagaagtggctggagaagctcgtcaccacgcggcttctgactttcttcagcccgtgcatctgggccgaaacgggggcggaagacgcgatgggcaacagagcccgcgcgttcctgcacgggacgtggctcggccgcaagatcaccgattccttctga

SEQ ID NO: 27603 - DNA, 1248 bp, Emericella nidulans
gtacgaatccgcgtcgactcccgcctcgatcgccagacatcgaagaaatatggcaccagctcgtccattgcctctgaagctgtaaacgctatccggaccgtttcgtcccttgcaatcgaagagacggtgctacgtcgatacacggaggaactagaccacgctgtctcgtcttcggtgaaacccatggctgccacgatgatttgtttcgggctgacgcagtgcattgagtactggtttcaggcgctgggattctggtatgggtgtcgtcttgtgtcgctgggggagactagcatgtatagtttctttgtcgcattcctcagtgtgttctttgcgggtcaggcgtcagcgcagctgttccagtggtcgaccagtattacaaagggaatcaatgcgacgaactacatcgcttggttgcaccagctccaaccaacagtgcgcgagacgccggagaaccacgataaaggccctggatctggggcgccgattgctatggacaatgtgcgcttctcgtaccctctacggccagacgcccctatcctgaaagggataaacaaaggccaattcatcgctttcgtcggctcctccggctgcggcaaatccaccatgattgccatgctcgagcgcttctacgatccaacaacagggagcatcacaatcgacgcttccaccctcaccgacataaaccccatatcctaccgaaatattgtggcactggtgcagcaagagccaacccttttccaagggacaatacgggacaacatctcgcttggcgtcttcaacccgaatacgcagcctttcttttctgataaggatgcagtgaagtccgtgtctgatgagcagattgagtcggccctccgcgcagctaatgcctgggactttgtctcctcattgccgcaggggatctacacgcccgctggctcaggcgggtcccaactctctggggggcagcggcaacgcattgccattgcccgcgcgctcatccgagatccaaagatcttactccttgacgaggctacgagtgccctggatacagagagtgagaagatcgtgcagaaggctctcgagggggcggccagggacggggaccggcttacggttgctgttgcgcatcgattaagcacgattaaggatgctaatgttatctgtgtattctttggaggaaagattgcggagatgggaacgcatcaagagttaatagttaggggggggctgtatagacggatgtgtgaggcgcaggccttggactaa

SEQ ID NO: 27604 - DNA, 891 bp, Emericella nidulans
agtcgggccaagaacgtcctcgcgttcctcttcttgactgacggaatccctattgtttatgcgggccaggagcaacactattcaggcagcaatgatccctataaccgggagccggtttggtggtcctcctactcgaccagctcagagctatacaagttcatcgcgaccactaacaagatccgaaaactggccatttccaaagattccagttatctcacttcccggaatactcctttttacagcgatagcaactatatcgccatgcgcaagggctctgggggctctcaggtcctcactctcctcaacaatatcggcaccagtatcggttcctatacattcgacctgtatgatcatggatacaacagcggcgccaacctagtggaactgtacacatgctcctctgtccaggtcggctccaacggcgcaatcagtatcccaatgacatctggcctcccccgcgtccttgttccagcagcttgggtttctggcagcgggctgtgcggcttgacgaaccctacaagtaagacgaccactgcaacgactacctcgaccacgacatgtgcctcggccacagcgacagcaatcactgttgtatttcaggaacgggtgcagaccgcatacggtgaaaacgtcttcttggctgggtcgatctctcagctcggcaactgggataccaccgaggcagttgctctgtccgcggcccagtataccgctacggaccccctgtggactgtggccattgagctgcctgtggggacctcgttcgaattcaagttcctcaagaaacggcaggatggatcgatcgtctgggagagtaatccgaatcggtctgctaaagtgaacgagggatgtgctaggaccacgcagacaataagcacttcctggaggtag

SEQ ID NO: 27605 - DNA, 396 bp, Emericella nidulans
gttgggttctaccacgacctgttggcgcgcggtgaagagcagcatgatgctgctatgaaggcgacggaggaggcggcaaggaagatccaggagaatggtggtgaggtaccgacggatacaacgcaagaggacgaaaagaccgaggcacaaatcgcagcagagctaaacgcgcgcggtgctcatattgccgtcaatgatgacgggcaagttgttgacaagagacagctgctctccgccggtctgaatgttgcacctaagccgaaaaatgctgcacctgccgcggcgcggacgacagctggtgctggcaccggtcccacgtcacgggaccattctcgacaggctgctggacgtgctggacagcgtgcccgtcagaccgaaatgaataacaaccactag

SEQ ID NO: 27606 - DNA, 1005 bp, Emericella nidulans
agaaagctattctcatcaggcgccacttatctgcttgctggcatgacaggagaccttggtctctcgtggtcccgctggatgattgccaatggcgctcgaaatacttgcctgacgacccggaatccaaacgtcggcgaagtactgctgcaagacatgcgcaggagtggtgccgatattcgagttttccggaacgatttcaccgaccaaaatgctgttcgtactctggttgagaatatcagattgtcaatgccgccaattgccggagtcttcaatgcgtgcatggttctccgggatggactcttctctgaaatggacgttgataccctcaatgatccactcgcgcccaaggtcgacgggtctaagattctggacgacatcttccaggacgactctctcgacttattcgtcctcttctcttccttggcgagtatcattggcaatgctggccaatccaactaccacgctgcaaacatgttcctctctggtcttgccgccaaccgccgcaagaagggtctggcagcgtccgtcttacacatagggctagtcaccgatgtaggttatgttgctcgcaggggtcaagcaatggaggaacgactccgcaggctgttctttttgccattgtcggaatcagatatccatcatgcgatggcacaaactattctagctagtccgcataacagctcgcgtcacagcgaaattatcttgggtttagagccttttattgattcacccaacgcgactaagcggcccccttgggaacacaatcctatgttctcgcattacgtctcccggccattgcttcaagaaacgccggcggctacgacggtggaagctgcagcagacgtgaaacagctcttgaggtcgacggtctctggagaagcagtcatacctatcgtgcaagaggcattcgcaaggaaactcgaatcgatgatgcagctccctgccaatagtatcaatctgaacgtccccttattgacctgggatgtgactccttgctggcattga

SEQ ID NO: 27607 - DNA, 468 bp, Emericella nidulans
gaccacgctctgttcacggaagaacttctcgagaaggccaccgcggctattctgaaaacccgtgacggcctcctgcgcgccgcagtcccaagtccccttggaagctgcgttttcctgaacgatgtcacccgggaagagatgggtgcggcactgcgtaggcataagagtctcatgaaggggtttccacgtgagggagccgggatcgaggcgtttgtcgatgccagtgatacgggatatacgatgaatgggactgagcatgaaggtgagaaagagaaggacggtgcaaaggtcatgaatggccaagcacatgtgaatggaaatgggaacgggcccacaaatgcgcagaagataaccagtgatgtggaaggaagcgtgcgcaatgtcttcggaaatggagtttttaatgagctgaagaagtcattgcccatggctacgcggattgcctgtgctgttgaagaggaggcctag

SEQ ID NO: 27608 - DNA, 384 bp, Emericella nidulans
aagcttttcttcgtctcgattcttcttgccgcgttgctggcaaccgctgttaaggctgcacctgccgctgaattacaacatcgatggtgcagattcgccggtagaatctgccccccgaccaagcgtactgccgacgccctcaactttgtcaagcgtgaggccgaagcggtggccgagcccttcaaaatcaatagatggtgcaggttccgtggccaggtttgtggcaaggccaaacgtgccgcggaagccattggaaatgtcaagctctctgctgaggccgttgcagacgctatggcttttttggatgagcttacccgggaagagtacgcccagctcgcgaaagatttcggccatctcaaggagtctgacaattccgacgggtaa

SEQ ID NO: 27609 - DNA, 732 bp, Emericella nidulans
gccgccgtcgcagagaatgctcccccggtgacgaacgagaacacggcccctcctgccgttgcagttgaagagaagaccgagaaggccaacggcgacatcgtcacggtcttccacgacccagagaacttcaacgtaaagcatcccctgatgcacgaatggactctttggttcacaaagcctcctagtggaaagggcgacaactggaacgatctgctgaaggaggttgtgaccttcaactctgtagaggaattctggggcatttataacaacataactccgacctctgaactaggccttaaggcagactaccaccttttcaagaaaggtgttcgccccgagtgggaagacccgcagaacaagcacggcggcaagtggtcattctcgttcaaggataagcgatcggtccctattgatgatctttggctgcacgcacagctggcggccatcggcgaaaccctcgagaatgatggcgataatgaagtcatgggtgtcgttgtgaacgtgcgtaagggtttttaccgtgtcggtctctggacacggactgttggcaaaacccttcccggtgacaagagcggacgcacacccgctcagggtaaggaagtgcttgagtcaatcggccgccgcttcaaggaagtactccgtcttggtccaaatgacagtgttgaattctcgggacacacggatagcgcccacagtggcagcacaagagccaaggccaaatacactgtttaa

SEQ ID NO: 27610 - DNA, 1149 bp, Emericella nidulans
ctctgggagcggccgggtgatgtcacagttatcgagggaaagggccagcaagtctgcgaggtagatttcttcgccctcattagatattttgttgggaccgtgacgacaacttctctattcggccaagcgattttggacacttttccaacattgcttcaagatgtctggagtgttgatgaccagttcgctaccttgtccatgggaccgcctcgctatttaactccaggaatttctgcagcgtatatggcccgtgatcgactattggatgctcttgcaatatttcaccaagctttgctactctgggatgaagggaaagaccttgggatggaattccgcgaccttcgtgatctggaagacgtctcggagccgatcaagaaccgcgcgcgcatggcgaaggacatgggactgacgccacaagagagtgctcctgcgcatctagcattgctctgggctatgaatgggaactcgcctaacatcgtattctaccatctccttcatctctacgctaacccgacgctcctggaggatcttcgaaaggagatcgccccgtttgtcaaagtctcgaggccgactcgagaggaaaccgggtttccgatactggaggcacctagactttctattgacatcgataaactgtgtgattcttgtgaacttctgaaagcgagtttctacgagactctacgcttggactctgcagggttgtcctttcggcagttgaccgcagatctgactatcacggagagtgaggaagaggcctcaaaggcaggccggttaacgccggagtcttattcccttaaaaatggcgagctagtgatcataccccatggcgtcatccacaacgatccgacacacttctccaatcccgatcaattcgaccctctcagatttataagaactgacccacaatccggccagaagtacgcaaagtctgagaccatgactccattcgggggcggcatgcctgcctgcaaaggacgtgctttcgcggagaaaaaaattctcgctctttccgcagcgattatatccttgtggcagattacgcccgcagagggaaagaaattcaagattccagagcacagaatctcgagtgctgcatttttgccgaagaatgatataagggtgcggatgtcaccgcgatacccttcgtga

SEQ ID NO: 27611 - DNA, 366 bp, Emericella nidulans
tccgtccctaccttcactgccgcccttacggcctcccagaacaaggagaagtactccgccaaggtgcaggagctcgccgctgccatcaacgccgatgcccttacgtccgccatcgaggctatcctgtccggtggcgacgatgctactgtctcggacgccgagcagagcaaagccctgactgcgggctttgagtacgcgacggagctggtcaaggagttgaagagctctcccgggaatgatgataagctgaaggccaagtacaagtacaacgcgtggaaggagatcaaggatatcagccagcagcgggcccaggctctgtacatccagaaggtcaacgctctcctcgagtcgatcggaaccaactaa

SEQ ID NO: 27612 - DNA, 483 bp, Emericella nidulans
gccgaggttaatcgccacgaacgcctgagtcagctccatcggggcaatctgcagaaagacgaagtcgtcgccaaagctacgaacaagctcatcaaacacggcatcatcccccaaccgcccgaatacagagaccgcgcgcgcgaggctcgccaggcattcggtcgttccaagaacgccacggccaaacccgctccgccgccagagcgtgaaccatccccgccggttcagacaacgtccaagggcgcttcgcttctcagcaaaatgggctggtcggctggcactgggctgggtgctcaaggtacaggaatgacagcgcccataacaacagaagtctacgcgcagggcgttggattaggagcccaaggcgggaaactcggcgaagccagcgaggaagcggcccgcaacacccgcaaccgatacgacgagtttttggaaaagacacgacaaacagcgcgggagcggtacgaacagctggggaagtga

SEQ ID NO: 27613 - DNA, 489 bp, Emericella nidulans
accctcaatgcatggtatagcgctattggcaccaaggttctccacgacggtctctcttgctccacggcatggtctacactcagctactcagagaaactgcttctcggtggtgttactgcctggggtgttcgtctgttccaccggatcgcgactcgtggtgttgcacgtggcaaggacgacccgcgctacgatgcgctcaagaaggaccccggattttggaacaagtcgctcttcaccatgttcttacctgaggctgcagtgcagacgctcatctcgttgccgttcgtgctgcccttccgcaagaccgctgagagcattgctgcttcgcccgtgaccacggaacgcggctggtaccacgcgctggccgtcttcctcttctcggccggtttcgcgatggaagtcctcgctgataacgacttgcttcccacaagaagaagggcgacattggtgtttgccgcgacggagtctggagcgttgttagacacctaa

SEQ ID NO: 27614 - DNA, 1242 bp, Emericella nidulans
gtagacgaagcccctcatatcgctatcatcggcggcggcattgttggcctcatccttgcggcaggcctcacgcggcgcggcataaaagtagacctctacgagcaagcgcgcaacttccgtgagatcggcgcagggatcggcttcacagccaacacagtgcgctgcatggagaagattaacccggccattgttaaagcgctgcgctctggcggggccgtcaacgtctcgctcgaccagcaggaccccaagtcttacttacgctggatcgacggatatgggcagcgcaaagaagatgatccaatgtatcagacgcctctgctgaagctggatgcaggagtcaaggggtgggagacggtgcgacgagatatgtttctggatgaccttgtcaaggtcattccggacggggttgtgcacttgcagaaaaggctgaataccattgaggacgatgatgggtcagagagggtatttttgaactttactgatggtacgagggcacaggcgaatgctgacaacccagcctcctaccctcaatacacacataaagtggcctaccgcgccctgatccccatggacaaggtcaaagacgcgataggcgaatacaaaactcacagacagcacatgcacgtcggccccaacgcccacctcatccactaccccgtcaacacaaacaccatcggagccaccgttatcccaatgtctggcccctggacaaacccaccagccgcacgcgcgtcacgcaaggaggtttccgaggcactggcaaactggtctctccctgtccgcaacctcgttgatctcttcccggaagaactcgaccagtgggctctttttgatctcttcgagtaccctgttccacagtataacaagggccgagtctgcctggtgggcgatgcggcgcacgcgtcaagtcctcatcacggggctggcgcatcctttggcgtggaggatgcgctgtgcctttgtaccatcatgtctgagctgactatggagcttcaccaacacagtttaaataaggctgaggctctgcgggcggcatttgagacttacgataagcagcctgagtgggctgatcctgccaagagggtcaaggcagagtcctgctttgaggaggtcaaggatcgttcgttcaagatttggcattttgattccgcagcgatggtggatgagacgattcaggaatacaggaccaggttagagtccctaatcaatactgcaaatgtcattgacggattgacggcgtga

SEQ ID NO: 27615 - DNA, 642 bp, Emericella nidulans
ccggcaggttcagtcgttggaacatcttccatccgccgcaccgcccaactcgctcggaaatacccgcacctgaaggtgatggacgttcgtggcaacatcggcactcggcttgctaagcttgatgcagaggatagtccgtacacttgtcttatcctggctgccgcaggcttattgcgtctggggctcggagatcgcatctaccagtacttggactcaaggaacgcggggatgctgtatgccgtgggtcagggagcattgggcattgagattcgcaaaggagataaggccatggaggatattctgaacactattggtcataaggagacaacctttgcttgtctagctgagaggagtctcttgcggactctagagggtggttgcagcgcgccgctaggagtagagactgagtggattcaggacactaacgggtcatcgaaactgcggatgaggtctgtcgtcgtcagcgtggatggtagtgaacatgctgaggtcgagattgatggaacagttgactcacctcagtctgctgaagaattcggtgtcacggtagccaaagccctggtcaacgaaggagccgggaagattctctcagaaatccagcaaaacagacagctgaaggttcccgtttcggagtcaacctaa

SEQ ID NO: 27616 - DNA, 597 bp, Emericella nidulans
cgaatccgatatccttttgcaggccttcttccacacagcgaatcgtcctccattcctgccaatctacaaccaaatgacaagctccttcacgtcgtcatcttcttcctcatctccctcattttctactggattcccgacacctcccgccggcgtacgctccatttgaccctggttgtctgcacccttgccctcggcgtcggatccgaaatcctccaaggaattctccccaacggtcggtccttcgaccctttcgacctgctagccaatattgtcggaagtctcggtgcagtcgggctatgcggttggtatcaccggcggatgttggaacggcggcgcaagtcccgattcgggtccctcggtgagggcggcgaagacgatgtcgagcttggtatgagcccggatcaccgtgagagagagcaactagagccgcaggaatctggtgtggtcaatctagagcaggaggttgataactgggatgagaatgctgtcgacacttgggacacagaagatggcgacgaccccagtagcggcttgactgggaaggctgctgcagataaagatcagaagggtcttgcagaagggaagaggaatgactaa

SEQ ID NO: 27617 - DNA, 270 bp, Emericella nidulans
gagactgttaagaacgccgtcaactacgtttccgagtccgtccagggcgccggtgccactgcctccaaggagaccaacaagaacgtcgctaaggactccgacgcttccctcacttctcgtgccactgccgccaaggacgccgtcgttgacaagaaggacgagaagtcccatgatgctaaggccgatgtccacaagggtgggtcattccactttgcctccaaagatagatggttgattactgacaatatcacagaggccgctaagaactaa

SEQ ID NO: 27618 - DNA, 1065 bp, Emericella nidulans
aacctgtcgtcatccatcattccgacgcgcatggtacggaggagtactattcggtgcgctccattcggacccagcaaccccgactgtatcgcaaactccgacaactcggtcatggtatcgttggctgttcgtgtcgaaccggaaggggcggactctgatcatggtcactctgacgccgtatcctcgacccagaagctagttgcaataaagatcattgaacacgggccagcgggtggagccgatgaggagcgactggaggtgtccctgaaacgtgaggtcgaaatcctcaagtctttgaatcatccatcccttgtacaactcaaggcttttggcagcgacgaaaaacgcgctctcctggttcttgactactgcccaggcggcgacttgttcgaagtcgtctcgaacaataccagacccctgactccggggctcatccgacgaatttttgccgagctggtggctgctgtacgctatttgcacgagcattatgtagtgcatcgtgatctcaaactcgagaacgttctcgtcaatcttcccaaagaagctctgcaaaagattaccgattggcgtacttatgaccgtgcagttgtgaccttgagcgacctgggcctctcacgacgtatacctgaacctcctgagagccctcttctccaaacccgctgcggaagcgaggactacgcagcaccagagattctgatgggccagcagtacgatggccgctccaccgacggctgggcgcttggagttttgctgtatgcgatgatggagagcagacttcctttcgacgccctccctggaacccgaggcgatcctgcgaaactccgagcccgaactcctcaccgtatagcacggtgcgaatggtcctggtaccggtacgcagacagcgacggtgagtgggatcccgagaagggccgtggtcttgaaggcgcgcgggagtgtgttgagtcgctcctgaaacgaaacacaaaacgcaagagccttgaagagatcgcggccatggagtgggtgaaggacgccattgacgtgcctggcgggttgaagcgaggcgataaagaagtgccctga

SEQ ID NO: 27619 - DNA, 453 bp, Emericella nidulans
cgctaccaagggacctggctccttacaattgggactttgggagcgaccctagccacctcgtcttcctcctctactgagaaaaacatcctcgaagtagacctcgtcttcccccagaacaaaacgtacaagcccacagaatggttccccattgtctttggtttccagaatccgcaacgcgcccagtacctcaatattgacctcacctattccttccacccccacgagaccaatacgcagaacgacactatcaccctcttccacgacctccgctgggaaaactggtcctcgcacgacccgtacttcgcgcacaatttcctcgacaactttaacagccccggacgctggaacctcgcgtggacggtggcatggcaatcgtgcgacgaagagggctttgagaaccggctcatgacgtctgacatgcttacaaatcagacggacttttcaatgtggtga

SEQ ID NO: 27620 - DNA, 1020 bp, Emericella nidulans
ggtctcccgaccttcctctacaaccaactcctcatcaccccagcaatcccaaccaacccgttcaccggccaaaccgccataatcactgggtccaacaccgggcttggtctagaaacagctcggcacattgcgcgactcggtgctgataaggtgattctcgctgtgcggaataccgctgccggtgagaatgccgccaaagatatcgaggaatccacgatctgtaaaccgggaacctgcgaggtatggccgcttgacctggcgagcaggcactcggtactggcatttgcggagaaggcgaagaaggaattagggaggatcgatgtcctggttttaaatgcggctgttgctacaaagatatttcaactggctgatgggggatatgagcattctattaccgtgaacacgataaatcacttcctactcgccattgccctactcccaaaactgcaagaaacagggaccaatttcacaaatcgattggctccaccgcatctcacggttttgacgagccaggtccacgcctggccggaatttccacaatccacagaccctcggggcatatttgttgcgctgagcgacaaagctacggcgaaaatggatgagcggtatccggttacaaagttgctgaatgtatacttgacgagggaacttgtcgagcaactctacagcgacagtgacggaaaagacggcgagccatctgtggtaatcaacatgcttgacacgggcttctgtcactcgcagctctcgcgcgagaatcagggcgtcgacgcacttgtattcaacctcttcaagagattatttgcgcgcaaagaagaggtcggagcgcgcacgacggttactgctgcgagtgccggggttgagtcgcacgggaagtatatggttaacggaatcgtcgcggacgaggcgctatcggagcggatctataacgaagaggggagaatgatccagaaaaggctctggaaggaattgacggatattataaagggcttcaagccccaaattatggaggagttcaagtaa

SEQ ID NO: 27621 - DNA, 1485 bp, Emericella nidulans
gcttccccgctttctgctgaggatggagaacaaaccgccgatccaaaggtattagaagagcagcagcaggctgtcaatgaacgcctccacgcaatctaccagaaggcgcaagaccgtcttggagagctggttctgaacgcaaagaatacgcgcaggggctttcttgaacaaattctcaacccattgctgagccagcaccgaaaacagacgtataccctgtccgaagctttacgagaaatatcggtccgtgcggacaagctcaacaggtttgacatatttcagcagcctgtttctgtgtatctggaccagactccagcctccgaaacgcaaacaggcctcacaaatatcagtgtatactattccgtgaaccagaaatcccgtgtcctgctcaagaccggaactgacctcggcaacgcggaaggctcagcctatggtaacctcttatggcgcaatgtatttggcggcgctgagaacctgaatttcaatgcttcattgggcacaagaacgcgatctgcttaccaggccgcgtttgacacacccattttcagtgatccggactttcgcctagagcttggtggaatcgccagctcgacacagaagacttgggcaagccacgaagaggtgttgaagggcggctggagtaaacttcggtggttgagtcggtcaggccaacgccacgaaattggctacagtggcttctggagacaggtgaccggcctagcggacaatgcatcccctaccgttcgagcaaatgcaggcgacagcgtcaagagcagtgttttccatagctggaccacagatcgccgggacaacccttttttgccctcacgaggttactacgccaaggcattcaacgagctggctggctggggtccgcttaaaggcgacgtcgcgttctggaagtccgagattgaaacacaaagtgctattcctatcccaatccctggagttaaaggagacagtggcgtaagctttactactggtttccgtgctggcctgctctatcctcttagtcttgactcggattcccggccacgcttgtctcgcctcaatgaccgtttccagctaggcggtcctacagatgttcgcgggttccgtctctctggcctcgggcctcgcgatggaactgatgcagttggaggcgatgtttatgctgcaggaagcgccaaccttcttttcccagttccacgagtaggcgctgagaagcctctccggcttcaagcgtttgtgaacggtgggcggttactgcctctgagaaacgcgcaaaaggcggctccttccagcagcagcgaagtgaaagacgctatgaaattcaccttgtctgaaattggcaacggcctgccgagcattgcagctggtgttggacttgtgtacgcccatccagctgctagattcgagctcaacatctcccttccgttggttttgcgtaagggtgaggaaggcagaaaggggctgcaactcggaattggtataaactttctgtaa

SEQ ID NO: 27622 - DNA, 1080 bp, Emericella nidulans
cctgggatgatcgagggtggaatgggctggcagattgtggatgcactggacacgttgatgatcatgaacttgacatctcgtgtacaacatgcgcgcacatggattcataactcgctacaatatgaccaggatcacgatgtgagcacttttgaaacgacaatacgcatgctcggtggtctgctctctgctcattatctctctacggagtattccaaccttgcccccattcccgacgacgacgttggttccccaggggaggatctctatattgaaaaggcaaccgaccttgcggaaagactacttggggctttcgaatcggaaacaggtattccgtatgccagtgtgaacctcaatacatcgactggtatcccgtcgcattcagaccgcggcgcctcatctacggctgaggccacctccgtacaactggaattcaagtacctagccaaactgacgggcgaggctgagtactggcgcgttgtggagaaggtaatgcaagtggttgacgccaatcaagcccctgatggccttctcccgatctatatctatccagatacgggaacgttcaggggagcgaacattcgcctcggtagcagaggcgactcttattatgagtatcttgttaagcaataccttcagacgtcagaagaaatatacaaggacatgtgggacgaggccctcgtcggaattcgcaaacacctcatcacattttccaagaatgccaagttgactgtcctgggcgagcgacaggccggtcttgacggccctctaaccccgaaaatggaccacctcgcctgcttccttcctggaacaattgctctcggggctacagaaggaatccctctctctgaagccaaaaagtccgccgcatggactcgccgtaaggacgaagaaatcctcctcgccaaagaactcatgaaaacttgctgggcaacctatctagccacccgcaccggcctagcccccgaaattacctacttcgacatcgacaccccgcacgtctccgagctagaccggtatcccgactccacgctcgccgcaggaacgcggacaagaagcccgcggacaaagatctaccgctga

SEQ ID NO: 27623 - DNA, 1104 bp, Emericella nidulans
cagagcgaaacccggagtatccagaagcagaagttctaccagtcgaccgtggccgcaatgaatgcggaaaaggccaccgcaggggacacaaagacaagcaattacctatctcataccgatagggaacagccggctttcaagtcaagcgaggaatatacctacactgttggtgatgatgaagagcagccggcgataccgcgggcgccgccggggccgcagcagcaactcaaggactccgaaccagttacagaggagattccaattgcgggccggaccaagatgactgttactaaggagaaagggggtgatgaaattaagacggatgctgagactggggctgtgtccgtgcaggaggacgaggacgaggacgaagacgatgaagaggaagaggaagaggaaaagcaacagaaattagagcatgaagagcagaaggtcaaagccgagctgaacgatatgctgaaacggtcgccgacgcctttcgtggtagaactcgaccaacatccgcttggtccacaactacagtcgcttttaggagaaaataccggccgtcggactgttccgaacgttttggtcaatgggagaagtattggcggcggagatgatatcgttgccctggacgagcatgacgagctggcatcgcgattgaagacagtcaagatgcggtacattcactccgaggaaacgctcccgatccccgagaatggtgagcttgcgaccctgatttccttatcaacatttgagttggacgaagatacaaaacgttctggatcaagagtgaaggttcacattcgctcgcgggtcgtgaccgttgagggtcctcgaggcaagctcaccaaggacctctcccacattgccgtcaccttcggccgccccaagaaggatgtcatctccattgagatgcaccacggctctcgcaagggtgtcgctaccctccgtactgtccgcaccctcatcaacaacctcatcatcggtgtcaccaagggcttcaagtacaagatgcgctacgtctacgctcactttcccatcaacgtgaacattgagaagaacgccgagactggccagtacgatgttgagatccggtatgcaactcccgctgcacaatag

SEQ ID NO: 27624 - DNA, 1041 bp, Emericella nidulans
tctgcgctgaatccactatgccagtgttcccccaaaaagaatctccggcatgagaagcgattcgagcccagaaagtcgccgctgatcaagatatcgtgtggcgcgataggatgcgaagctggcttgtgcggcttcggcagtcttgcctctatcctaccggaaatcggcgtattcgctgctggtaacggcccattacgatcggtcaatgacgttttggaggtgatgatcgaccagaacgatgctctcatacatgctgaggaacgctctcttctcctctcgcaacttcggcgtggccagctactagaaaatgctaagcttaaaagagaggccctcagcctctggaagaattcccttcatcgtgcgagtgataccgttcagcaatgccgggagagacttcagacggaacgaaagaagcagctaacgcctctagctaatggagcgcatgatgaaaggctgtccttcagtgacgatgaaagtgaggaaaccgagaaaaactctcgactccatgtattccgccagcgactacgaactgcgctcgaggtcgaacacattgctgtattcttcacaggaaatgcttattttcagataaaatccgatcatgaactcaccaaacccgactctgaggagtttcaggcgttgacaaagttagaggaggaggcttacgcgaaagccaaattaatccgacaagaaatgctgactgagatttcccggaaagctaagcattacgtgaagagaatcaaagagaaagccgagaagaaagatttcgtggctattccggaaatgaagcttcatatgtacagtaaagggcttgaatctcgtcgtgtgttcgagcgacttcaggatttctgcgatatgatgaatgaccacgctgcccaatacaaggaatggcgtgagaaaatggtcaagctcctttcacaagcactcattgatcaagaggacgagtctgagcttgagggcgacgagtatgaaaagtctacaaagcatcaggatgagatgtatgtctacatggaagcgctccgtgcattatttgccgacctctaa

SEQ ID NO: 27625 - DNA, 1173 bp, Emericella nidulans
agtttcctcgggcttctgctgtctgcagtttttcctgtggcaatttacggaatttttctagtcgtctatcgcctctactttcatcctctgcgtcgtttccccggccccaagctcgccgccgcgacattctggtatgaagtatactacgactggttcaagggcccctaccccggctctagctggaacttggaccgactgcataatcagtatggccccatcttgcgaaagacgcccgatgagctttccatccgcgaccccgactacgtagacgtgttcttcgccgggggccggcgcgaccgctatagccggcagggtaaggaggcacaaggctcagtgcagtcaaccctcctgggcagcgaccaccggagacggcggggcgcattaactgggttcttctcgaagcgctcgttggataccctcgagccgtttatcatggacaaggtggagcagctttcggctagcgtggaggagaatttcctgaagactggcaatatcctagaggccggggtagcttttggcgcgctcacactggataccatcacggactactgctttgatcagagcttcggctgcttgagcaaaccagatctggcacccgagtggcgcaggacgttctgggatatgctggaaagtatcccttttctgaagaactggaccttctttgcagagatgttcttctgggtgccacagtgggtggtgaaacatacaaatccggcgatggagcagtttttcatcatgcaagcggccatcagagcgaaggtcgcccgcgtcacaatggagtgggagcaggaccaggcgctccagttacagggtaaagatccctttatgaaggggaagaggaagaggacgatcttttacgatattctcaatagcgctgtgcttcttccggaagataaaacacccaagcgcatggcggaagaagcctttgatagtatcatgctggtcgagccagtcgacactcttacctacaaagattgggtcatcccgccaaaaactcccatcggaatgaccttgtaccatatgcatatggacgagcagatctatccggagccaaaggcgttcaagccggagcgttggatcaagggtgcagaggcgaacgacgatctcgacaagtactttgcgcccttctcaaaggggactcgcggctgtttgggggttaacggccctcgctag

SEQ ID NO: 27626 - DNA, 519 bp, Emericella nidulans
attgacacttgccgcggtgtcctcaacccgcttgtcccggacacttatatcttctcggacgtgtcgtcagctccactcgttcccgccccggaaaggaacaacccctccgctaagaagaagatcggccttgggtttggcttgtctcttgttgccgaatcttcgaccggctgcctgttctcagctgacgtggcgtgcccgcccagtggtggtcagccgcctgaggatattgggaagcagtgcgcataccagctacttgagacgatctcaaagggcggatgtgttgcccctgcagctttccccattatgattggattgatgaccatgggatccgaggacgtaggccgtatccaggtcggtcgtgatattattggggatgagagctcaatccagctggcaagggacttgatgaagtttggtgccccaggttggggtctgagagacgctggggatgaaagtaacgatgtcatcatcagcgttgtcggacgcggtattggcaatgttggacgaaaggtcgcttga

SEQ ID NO: 27627 - DNA, 702 bp, Emericella nidulans
tttcaagatccgggcgccatcgacctcaaggaagacttccggaaccgctttcggaacgtcagccgactgatggactgcgtaggctgtgacaagtgccgtctctggggaaagctccaggtcaatggctacggcactgctctcaaggttctttttgagtacgacgagaccaagaacggcgagaatcctcctctgcgccgaacagaactagtagccttgatcaacacgctaggccgtatatcccacagtatcgcggcagtgcgaagtttccatcgtgcaatggaagtcaccgatggtcaggttttcgcaatcccggccggatcaacagcaggccagagtcgtgcaggtggcaagaaagtccgccgtcttgtcaaaaacggcgggtcaacgttctactacgaagacgataccgccgaggactatcagtatatcagccagcagcgtccctgggagcggcaacgggtgaagcgcgagggtgacaccattattgacgatttcaaggccgagttctcggtcgtatgggatactctcatcttcgtcctgaaaagctgggttaatataccctggaccttctgggagatcggggtcctcgaagccaaccgcctctggagttactggctgggtcttcccgtgccgccgcgagcttggagaatccacgtgccgcagcgaccgcctcctccaattgttgtgcgcgatgaactatag

SEQ ID NO: 27628 - DNA, 540 bp, Emericella nidulans
cggaatgctgcatgcgatacgttcctagcaggatccgtagtgcaggccgcgagcatgcccgcaagtttgaaggagctcagagcccgtgagcaagtgagctcagcggagctttacgagaagggcttcggcaaggacgcggcaaaaggggccaaagacgcggtggaagatgctgcagcgaacaacatcgacgttgcccagatggacaccgctggccgtcgtcataaagatcagcgcctcatgacctcgcaggagatatacgccaagttcgctcagccgaacaagattttcatggctggagaagccctcgttggtaccgacagtgtgatgcaggcacgcaacttcaatcaggcctttggaacgggtagaaacctcgacggattcattatcagcaagtgcgatacagttggcgacatggttggaactcttgttagcatggtgcatgcgacgggcattccaattgttttcctaggcgttggtcagcattatggtgatttgagagggctcagtgtgccttgggccgtaaatctcttgatgaagtga

SEQ ID NO: 27629 - DNA, 1038 bp, Emericella nidulans
tgggctatggacttggggaccttgccggctttccaaaagtccacgacgccccccgctttcggagccccctgtatggactgcgagagtgctcaatccgctgcgggcattgaccccaagatcctcgatagctatcaatcagacaccgtcttcactataccgtgggaaaactcaggctacgagcggccgctggattgggatacgagtcaggattcgaaccatagcgactctgagttcgcagaccttagcggaagcactggtcttctgggacagcccggcgattaccacagcgatgattgcagcaaacatgcaacatcgccagacaagttcgggctagccgatgcatctgtggaggggaccctcagcagcaccgtgagcccgaaaaccctgccttccgccgacgataactttcagctggatgagtcatggccgcccttgcagatgttcaataatatgatggccggtttcccaatggaaggttctcttctctactcatacgccaaggagccggcttctgcagacgcgttcattgtcgaggatggctccgcaataccgcggggacagggactgtctgatatctcgtcggatcactttatgccgttccaaagcatttcgcatgcattcccgttcacaaatgaatcctgggctgagccgctcgccagtatcgagtccatgcccagacaagctcctgttgccgttggtatgggtccgcagcaagtcaaccggggttccaaacacggcgacggctaccagaacactatacagttcctggagacgcgctggcttgacagtctcgagtcgcagttgcctagcaacatgacctcgccctcgtcgttttctacatttccccagcggcctataatcatcaaggatgaagtaacgggccaagacatgtttcagtataagtctgaaaactcgtctgtatctgatgatatccctggaacctatgatttctactctgctactggagacgacgtcccggctttcgcggatcgccaactggatgaagagtggaaactcgagaagacgaggcatcgttag

SEQ ID NO: 27630 - DNA, 1056 bp, Emericella nidulans
actctacagccatctattctgaacgaggcatctcaggctatgaaatgggctagtaactacgacaagaacgcttacagggccgcttatctcaataatagccgtgctgggactggtgctgggactggtgctgtggtcgatgaacagaaggaacagcctaccccctcaataacaactagcacccgacaaccgcctcctgcttctcctaagacctctgctcccccttcagccgcaccggtaccagacgcaactgagaagcccgccgatgatgcgaaggttaacactaatcctgcgaaacagtcgaccgtagattctccgaccccagaaaccaaggaatctgtcgagcccgaattgccgcacaaactaaagaaagctggttttaaaaacatgtttggaacgaccaagaagaaagagacggatattaagcaacccatgaagcctgtagaagagagtaaggctagggcatctcaggaacagccacctgctcgcaatggtaccactgttctgaggaaaaagcctgttgcagcaacagctccagcgaagtctgttaagcaaatcactgaggtgcatgagccaaaagctactgcgaccccagaaccagagtctagtgccccagcctcagccccagcccaggttccggagccagcgccagctccaactccagaaaacatgagtgataaacccaagattcggcgtgaggctgaatacgatgccctctcccgggtagataccaatgaacaggtagcggccgatcaggaattctcccggtttgaccagggacccttattagagcaacctgcgtttgttcctgaagactcacccgtcgaggaggcattccctgcggagaagcctgaggatgagcccacccccagttcgcccgtatctccaccgcggatcaacaatgcttctcaggaccgttgggcccagattcgcaagaatgcggcggaaaggattgtccagactggaggccgtccaagtaccgctgatgaggatggcaacaccagcgaggaagaaagtgagtgtcttgcccgtgccccaacccttcaaatacagtactga

SEQ ID NO: 27631 - DNA, 528 bp, Emericella nidulans
ggtcagatcgggttcatgattgcgaagaaggtgtacgcggcatttgggatgcagatcctctatcacgatattgtgcgcaagtcccaggacatagagaggagcgtgaatgcgacgttcttcgagagtctggatgatatgctggctgagtcagactgtgttattgttgcgacgccgtttgccgggaagacgctgctgacggctgaactgttcgacaagttcaagcggggttcgcggtttgtgaatattgcgcggggctctctagttgatgagggggccctggtaggggcgttggagagtggcattctgatgggcgtaggtatggatgtgcatgcggacgagccgaatgtgcatccaaggcttgcgagccatccgaaagtcatgatgatgagccataatgctggtggtacagtggacacgcacattgggtttgaaaggctggcgatggagaatatactggctttttttaaggaagggagggctatgacgccggtgaatgcgcatctaatcaagccgaagagtgtgctgtag

SEQ ID NO: 27632 - DNA, 1326 bp, Emericella nidulans
tctcacgaggaagatctcattgactactccgatgaggagcttcagaccactgatgccgcagccaccactgccacccccgccgccaacgggggtcaagcgaagaaggacggcgaattgacggtcactggtggccgtgcggataagaagggaagttatgtcggtattcattcgaccggtttccgcgactttttgctcaagggcgaacttttacgtgctatcaccgattgcggtttcgaacatccttcggaggtccagcaagtctgcattcccactgcaattctcaatgtcgacgttctctgccaggccaagtctggtcttggaaaaaccgctgttttcgtcctcaccactcttcatcaactggagcctgttcctggagagtgctccgttctagttatgtgccacactcgcgagttggcctaccagatcaagaacgaatatgctcgattcagcaagtaccttcccgacgtgaagactgctgttttctacggaggtactcccatccagaaggatatcgaggtcctgtcgaacaaggacaccttccctaacatcatcgtcggtactcccggtcgtcttaacgctctcgtccgcgacaagaagctctctctccgcaacgttaaggctttcgttctggacgagtgtgacaaaatgctcgaccaaattgatatgcgccgcgatgttcaggaaattttccgcgctactcccaccgacaagcaggttatgatgttcagtgccaccctttcgcaggacgttcgacctatctgcaagaagttcatgaggaacccgctcgaagtttacgtcgacgacgacaccaagcttactcttcacggtctgcagcaatactacatcaaactcagtgaggcagaaaagaacaggaagctgaatgagctcctcgacagcctggaattcaaccaggtcatcatcttcgtcaagagcacaatccgtgccaacgagctcgacaagttactgcgcgagtgtaacttccccagtatcgccgtgcactctggtgttagccaggaagaacgtatcaagcgctacaaagagttcaaggaattcaacaagcgtatctgtgtcgccacagacgtgttcggacgcggtatcgatattgagcggatcaaccttgccatcaattacgatctgcctgcagatgccgactcttacctgcaccgtgtaggtcgcgccggtcgtttcggtaccaagggtctttccatctccttcgtcagcactccggaggatgagcaggtcctgaaggatatcgagaagcgattcgaagtcgctcttcctgagtaccccgaagagggcgtcgactctagcacctacatggcttag

SEQ ID NO: 27633 - DNA, 576 bp, Emericella nidulans
gtcaagagcgccatcacccgccctgcccgcaccattgttgagaacgccggtctcgagggcagcgtcattgtgggcaagctcactgatgagttctccaaggacttcaaccgtggtttcgacagcgccaagggcgaatacgttgacatgatcgctgccggtattgtcgaccctctcaaggttgtccgcaccgccctcgttgatgcttccggtgtctcttccctgctcggtaccaccgaggttgctattgttgaagctcccgaggagaagggccctgcgcccctggcggcatgggtggtatgggtgattgctagccgtagcgctactactatacccacccttctcaagctcatcatcccttctccagaagtcttcctccgtgtcacctctatatcgccaagaggcaagataccgaccaaatcgatcgccgatccgcgagaccattacggctcgggactgactctgcgtcacttccgcttcccaccgagccagcctggattcatcgacattagcctgcttctgcttcaggtcaagcaagttctctacctgggcaatgttagccggaacgtatcaaagtaa

SEQ ID NO: 27634 - DNA, 546 bp, Emericella nidulans
cgaacgacaatcatgacctctttcttccaacggaaccggagcgatctcgccttcctcgtgttcggtcacatgcgccaggctgaagatttcgcgcagcggcccaaaccagacacttatgcccgctgcttccggggccttgcacaaacacaagactcaaaacacctcgaactggtgcacaatatgctcaagcttgataccgaagtcgacctgaacacgcgtcttttgaactggctcatgctcgcatatgcggaatgtgacatgcctgaaaagagcatgcagattttccgtgagatcctccagtccgaagaaggcccgtcgcaacgtacaatcttcttcttcttcagagcttgcgagaagcaccataacggtacacatgaggctatgaaaatggtggagaaaatgaaacgccttgagattgccttcgaccgccggttatacacagcttatgtggaagccttagctgcgcagtgtgagttcgaccttgccacggaagctctagacgccatgaaggatgtgacggggcattcgccaacttttacatcgtaa

SEQ ID NO: 27635 - DNA, 1176 bp, Emericella nidulans
ttctgggggtattcactcacctactcgcgggatggcggcccctacattgggacgctgcagaattttgggctcatggatgccctggcggccccatcgccagggtctgccgtgcttcccgaagtcctcttctgcttgtaccagctcctcttcggttcctgcacggtcatgattgttgttggcggcgcctttgaaagaggcggtatcttggcgtcacttgtcttcgcctttgtctgggaaaccattgtgtactgtcctctcgcacggtggacttggagtagccatggctggctgtataatcttccctccgtcgacttcgccggaggcggcccggtccatattgcctcaggctgcgctgcattggcgtacgcagttgtcctcggcaagcgcaaaggctacccagacgccagtatgaagcggcctcacaacacgactctggtcttcctgggtaccgtctttatttggactggctggcttgggtttaatggcggttcgaccctcaacgcaagtgtccgtagttacatggccgttatgaacaccaacatcgcaggctccacgggcgtcctgggttgggtcctggtcgacatgatccggaacaagggaaaattctctatggtaggagcttgcgaaggcgccattgctggccttgttggtatcactccctgtgcgggatgtgtcactttctggctgggcgccctagttggtttccttactggcatcgtgtgttccgcgtgcaagaacctcaacgagtggattcgggttgatgaagggatggacgttttcaaactccatggagtcggcggtatggtcggctcattcctgactggcattttcgccgatcagtacatctcggcgttggatggcgattccctcattcctggagccatcaacggcgagggcgttcaggttggaaagcagcttgctgagatctgcgccatctccgcttattctttcggtgtgacctgggtcatactcatggtgatgaagttcattccatacctggggctgcgggccaacgaagaagctgagatggtcggactggaccgatccttcttcgtggacgagcagatcggcgactactccatgctggatgggatcaatagctcgccgttgatgggggtgtcgaaaacaccctcgagcgaagtacagcagacagcggccgagacgaaaagggcgtag

SEQ ID NO: 27636 - DNA, 1479 bp, Emericella nidulans
gacatcccctcgattgaccccagctatttaaagctcttccaagccgttgaatcccgctttgcacaggcaacctccatccctgccgacaaatgggccatcctagcgactaccaccctcgccgcaggcccagaccctgaacgcgctgaccaactatatctctatttgacttcgcaacccgcctacagtacctccgacgccagaaagcagctcgtgcggcgtctgcgggaagccctcctgaagtcagtcattattgtcggcgtctgcaagcccatcgaagcaatcctcgccatatcaaaggtcgaaaaggaagaagacaaggactactcttcggcaacgcgcgagggctgggcttgtgacgaagcaaaccatgagcgtggtgttacttggttcaataagctgtacgcgaggaacggcaatgctacactggatctgtttgctgcgcacaaagacttctcttggttaagtacggagattacttatgggcttttcctgagcgatcgccaggtcttagacgatgtggatacgcagatggtggtgcttccaggaattatgagccagaatctgcccaatgagacgcattggcatattcggggcaccaggaggctcggggtccccattgaggatgtgaagattgtaacggaacatctaccaacacaagcccttgaaataggcctggaagcaacaaacctcgcagaaatgggctctatactctccgatgacccaggcgccgctgctgacgcaacgaaagatgaattgaccgaactctttgcgccctctgctccgtccgggctccccgccgacatcttaatggagctgcaatctattatgcgcgtgcatagcatcacggcgcaagaactgttttaccgttgggagtcgtactgtttgcgcatgggctctgaggaaacgaaacttgatctcgagactgtgagactgttcaagcgtgatgtgcaggagaatctggaacgacaggcgaggggacgacagcaggttgagaaacgcggtggagctgcggcgacgccaaaggctagggatatgcctgttggagggggaacagtagcggcagatgtctttgggatgttggatggattgacgcctgcgcgaacacctggtgctggatcagcaaagaggaaagcggagttctcgtctccctcagtagctaagaagacgaattctcctcttgcttcgaagacgaatgttgcgaatggtaatggagaggggttacagtctgttcctttctcagaacgtcagaaccccgaagcatctgagattctggatgaccgaattgatgagttcatgactatattcgagaagatgtatgagaaggaggatgtcacatttggaagtgccgctgttcagagcacaaacgagattgttgccgttggccgtattgcctctgatagcccggaagggaagctcaatcctgcgtctcttgtgctcgagacgtcgagacgtagcggactgggcgaagggttcctctga

SEQ ID NO: 27637 - DNA, 567 bp, Emericella nidulans
gaggaagcagatgctctggcccaccgcgccggtatcatggctagacgtatgctggccctgggaacaacggatgcccttcgtttgaaatatggaaatatgtaccatgtgcatatagtccatacacaagcaccacatactagcgatgaagacatggagaagatccgcggctgggtgaccgataactttccaggcgccgttatcgagcagaaaacataccacggacagctgcgtttcagtgtccccgcgggcatctcccccgagaaggaaagagctgctcacagcgacgacagcaagggctcatcttatcgtgatattcggtcaactgatgagctccgctctgtctcgctgcgttctgatgtctcgattcccgtcgggttaggaccagacacggaaacggggccaggaaacttcagagccagaagtggtgtcagcaagcttttttctcaactcgaacagaataaggccgcactgggtgtggagcattactctgtcagccaaacgacactcgatcaggttttcttgacaattgtcgggaagcatcatattagcgagcaggattctggctaa

SEQ ID NO: 27638 - DNA, 234 bp, Emericella nidulans
cgctacaccttcttctccgtttcagcgcttctctacgcctcgctgctgggtccggctttctaccacctgtggatctacgccggctcaggaaacgccaacttcttttacgcaattactctcgtatggagtcttggtttttcactcatcctcgcggatatgatcttcgccgctcttcgcgacgaatgggagcaggagaacccagacaagcgcggcaaacccgtcaaacaagtgtaa

SEQ ID NO: 27639 - DNA, 1563 bp, Emericella nidulans
acagcctcgaacgatccgttgtggaggtttgcgctgccactgtcgccgacggagaagagttatagacctacacatcgggcgagtggtgctaggggtgcggtggcatgggacatgagctatatttccacaattcagcttcaagggacagaggcggccttggagactgtactcagaactgtaggagtcgtgggagacgatgcttggggtgccaaaggaaagaaatggagagctggtgtaagaagtcttcgcgcgtggagttttgagtccgagggtcagcgaaggcctattgctcctgttactctcattcgatgcgctcgtaaagtcatcgaagacacggagatggtcgatgctgatggcgataccaacaaggacgagcagaagcggaagaatacagcgaagatgtttgtcagagtccatccatctgcgttcttgcggctttggaacgagctgctggctatatcaaagaagcagtgcccgccggtcatggttgaagaccttcgctttgagattggcagcatcgacgtcaccggccccggttcaactgaagcgctacttgcagtcctacgaccattgggccagggtgagcctccagcggatagtccagagggcgtatggaatgctcttctgggagtcacgaacccttcgtcgctgccgcagaatgctcttctttcattctctatatcagatccccgtcttcacttccctcccaaaaaaatgaaagcttcgttctctgaccggagaatgcaagaattggccatgttactgtccacatggcctgccgatgaaacccaaacctcccccgccctattcgaccgccgtttccgattagcagctatccgcaacctttccagccaaaaagctattaaccgacgacggacagaagcaggcccgggcgagtacccgcgtccccagccttctgaccctcaaatccctgtgatcgtgcaagcaggtgaaattgggcgcggctgggcttgtgactgggaaagacttgttaagcattgtgataacgagtctgcgaaagatcagaaggagaagaactctaacgcggagaaagaggaaggctcggaaacagataagaccgtgtgcaaggaggacaagacggctattgaaccaccatttagaatccatcaactgccatattccgaggcgaattttgctatcaataaccctgcggtcagtgtggacgagtccgtctcgcaacagtcaaactcaccctctattcccgtggccatcctgcaccacgtgcacgtatttatcgtctcccctcgaatgacccagaccttcgccagaagtggctttcaggaagacactggatctaccagacagcgccttgcagcatccatcctgcttgattctgattattcctcaatccacaaagaacacttgccggtcccagttgaagaggatctcatcggattcatcacgacgggaaactttaacctcgctgaggggaaggctatgcaagtgcattttgagctggctatcaaggagagcctcagcttcgctgccgtagagatgcttgtgcagattagacgtaaagaagatgcatataaccccaagtga

SEQ ID NO: 27640 - DNA, 678 bp, Emericella nidulans
cctggcgtaatcctgatccccactaacaatgccagcctccccccagtacgggcgtgtctctttgacatggacggccttctcatcgactccgaagacctctacaccgacatcaccaatcaggtgctgcactcgttcggcaaaccttcgcttccgtggtccatcaaggctcaattgcagggtcgtcctcagccagaagtacgctcgctacaagcagaactcttcccgacgaccaagccgctgcccggcgtagagacattgctcaagaatctcgtgtctacgcagaagggccctaacccggtgcacattgccctggcaacatccagccacacacggaactaccacctcaagacgagccatttgcaggatctcttctccctcttccctgagtcccagcgtgtgctaggcgatgacccccgcatcggcaagggtagaggaaagccactaccggacatctacctccttgccctagaaacaattaacgccgggcttcgagagaagggtgagaaggagatcacgccggaggagtgtcttgttttcgaggatgcggtgcctggtgttgaagctggccggcgcgcgggtatgagggttgtttgggtcccacatccgggattgttggaggcgtataagggacgtgaggaagaggtgcttgctggactgacaggggagcataaagaatag

SEQ ID NO: 27641 - DNA, 1026 bp, Emericella nidulans
atcgccttctgggtgggctacggtagcaatctgcacatgggcggcactggctcaacgcaatcgaatctagcctggcagctcccatcaatcattcaaggaatacctgctgcccttcttctgcttgggatctggtttctgccgttctctccgcgttggctggccaagagaggtcgagacgaagaagcaagagaaaccctcgcgtatatccgcaaccttcctgttgaccaccccatgatagacttggaacacaaagagatcaaggctgagacgcttttcgaacagcgcgcatttgctaaagcctttcccgggctggcggagaaggagaaacaaagcgtcgtcatgcgcgagctggcgcagtactggcatatcctacgcaagtgggacgcgtttaagcgcgttgcaacagcgtggcttgtcatgtttttccagcagtggtctggcattgacgctatcctctactatgcctcgaatgtgtttcaggatctgggtctcactggcggaacaaccgcactgctggcaaccggagtcactggagtcgtctttctcgtgtttaccatgcctggtatgcttcttattgacaaggccggcaggaaacccatgttgattgccgggtccgtggctatgtggatcttcatggtcatcgtcgccatcctagtcgccaagttcagacacgactggcccggtcatcccgtcgcaggttgggtggctctcaacaacttcgccgttgcattctacacccccgaaatgttcaatatgtgggcatttggaacgtacatctggtttgcaggcttcttgactgttggtatcttctgggtctggttcttcctgcccgagaccaagggcgctacgttagaggagatggatcgagtcttcaagagccgcactggagcagaggacgcagctatgctcgcacaggctcgcgccgacgtcggactcgatcatcatgtcgtgcagatggccgagaaggccgcgatgggcagcgtgcatgtggatgatggaaggttctcgcaggaagagagggcttaa

SEQ ID NO: 27642 - DNA, 1086 bp, Emericella nidulans
ccataccgccaaggtcacgattctggcggaccaccgcctcctgtgcgccaatacaacggtgcgatgaactcccaaccacaatctgctccaccacaaggggctccggaaggcccagcgccaccggagccggtgacgcatgctgaattggagcgcctccagcagcaagcgcgaggtaacccttcggaccacaaacttcaacttactctcgcgcagaaacttgttgaggcctccatagtcctggttgaggccagcagactcgacccgaagtcaaaggcgaaagcccgggagaaatacaatattgatgcccacaaaattgtcaagaagctggtttcagccggctacccagacgcccaattctacatggccgactgctatggtcaaggcctcttgggccttcagaacgatgctaaggaagcgttctcgctttatcactccgcagcgaaacaaaaccacgctcaagctgcttaccgagtcgcagtctgctgcgaaatcggacacgaagaaggcggtggcacgaaacgtgaccccttcaaagccgtccaatggtataagcgcgccgcctccttaggcgaccctcctgcgatgtataaaatgggcatgatcctcctcaagggcctcctaggacaagcccgcaacccacgcgagggaatctcatggctcaagcgcgccgccgagcgcgccgacgaagagaatccacatgcccttcatgaactcgcccttctctacgttccgccacagagaacgatattgtcattcgtgacgaagcctacgcttctcaactcctgcatcaggcctccgaactcggctacaaattctcccagtttcgtctggggcaggcctatgagtatgcgccgccgtgcgcagggcgagcaccaatctgaactcgctctgagcggttggtaccttactggcgctgaagggatcttgcagcaaagcgatacggaggcatacttgtgggctcgtaaagctgcggcttcgggtctggccaaggcggaatatgcgatgggatactttactgagacgggaataggggttactgcgcacctagaggatgcaaagaggtggtactggcgagctgccggttag

SEQ ID NO: 27643 - DNA, 432 bp, Emericella nidulans
ggcgacatccacctccgccttttccccagcgcagcccccaaagccgtcgagaacttcacgactcacgcgaaaaacggctactacaacaacacaatcttccatcgtgtgatccgcaagttcatgatccagggtggagatccgctcggtgacgggaccggaggcgaatctatctggggaggagagtttgaggatgagttctctgctctcaagcatgataagccgtatacattgtccatggcaaacgccggaccgaacacgaatggaagtcaattttttatcactacggagaagacaccctggttggacgggaagcatacgatttttggccgcgcggtgcaggggcttgatgttgtgcataagattgagaatgtgaagacggtgaaggaaaagccggaggtcgatgtgaaaattgtcagtatatctgtttcatga

SEQ ID NO: 27644 - DNA, 228 bp, Emericella nidulans
ctctgtcaaggcgaggacaaaggactcggccagaagtacccgcagttcggtacctccggcaaaaagccagttggcgtctacgtcctgcccaagattctcgacgagcaggttgcctacctccacctctcccacgtcaacgccaagctctctactctcactcctgtccaggctgagtaccttggcctggatgctaagggcccttacaaggctgaccactaccgctactaa

SEQ ID NO: 27645 - DNA, 945 bp, Emericella nidulans
aagaccgccgtcaaaaccaccgcccttctctcccttctctcgaccgcgatggccgacaaggccatcgttggcggcgacgacgccgagatcaccgaatacccttaccagattgcgctcctctctggcggctccctcatctgcggcggctctatcatctcttccaagtacgtcgtgacggccggccactgcactgacggcgcgtccgctagctcgctctccatccgcgcgggctccacctaccatgataagggcggcaccgtcgtcgacgtggaggcgatcaccgtccaccctgaatacaacgccaacaccgtcgacaacgacatctccatcctcgagctggcagaagagctccagttcggcgacggcatcaaggcgatcaaatgtaaatgctgccatcgcaacaacggtgaacagcgccatcattgcattgtggctggttttttgcgcgcccgacgtcgggcttggagtttcttcttccgcttcgctagtggacgaggcaaactcgttgccgtcgccggtctccacaagtacatgcggcctgactgggatttggtgctcgtgctggttgttgtgctcatggttgacatggtcgacgagctgctcgaggaagtcgaggacgaggtgctggtgctggtgcttgtggacgtggaactaggggctgcagagctagaggtttcttcttcctcgtcgtcgtcctcgtcatcgctgccgctgccgcttgagctgtcaaagacaacaagcctggccttttcgcccttgggaacagtaaccacgcagaagttggcgcctcctgcgcagtccgacgaagagccggtcacctcattgacgtcgttctcggccggatcaatcttgcacggaagactgttacaggcgtcaccatcgcactcaatctcgacaccaaaatcaggccgcgtgctccggaacggagttgtgtcttccaggtaa

SEQ ID NO: 27646 - DNA, 615 bp, Emericella nidulans
gaattaccttccgcagcccatacccatggctctgggccaggcggccagttgcccaacggccagctttctgcgccagtttctgcgccaaacggactagatccaggactgggtctaggcttcaatatctaccaggtgccccatctacctgactggcattctgcgtacacggcatgcgtgcagcatttcgtcaaccacgcacagcactccgctgctgtgcaatcgctcgcagcatacatcaacatccgtctgccttgccagcaaatatcaaaaccgatcgcgcgctttgacgtccattcctcagagaccgcgcaggcttcatctcaagtctctgttcgccattacatccggcgcctcgtcgcaacggggaatgacactcccgctattctcgagatacttttcggcgccgaatgggttaacggtgtcggcaacattgccaaacaggagagactgaactacctcttcacggcgaagagcgccgggttcgcggctacgaaggccgcctacgatgtccttccggatgagcatacgccgttcctcagacccacccgcgccgcgacggaggaggagatcagcacgacgaaaagtattggagtgaatgcaggccatgaggattga

SEQ ID NO: 27647 - DNA, 1200 bp, Emericella nidulans
gcaaccatcaaggccatcgaggcccgctcatccggccaggtcattgttgatcttacctcagtgataaaggagcttgttgagaacagccttgatgctggtgccacatcgatcgaagttcgtttccgaaatagcggcctcgacctgatcgaggttcaggataatggcagcgggatcgccccagagaattatgagaacgtggctctaaagcactacacatccaaactgtcctcctacgatgacctccttcacctccagactttcggatttcgcggcgaagctttatcgtcgttatgcgcgctctccgactttcgcatcacgaccgcccaagctaaccaggccccgcgcgcgacccgtctcgagttcgaacaatcggggaagctgagaaagacagaagtagttgcggggcaaaaaggtacagtcgcatccgtggaaagtctgttcagaaaactgcctgtccgacgacgcgagctggaaaagaacattaaacgcgagtatggcaaggtcctgaatctgctacatgcatacgcttgcattagcacaggagtacgctttactatcaagaatacacaagccaagaagacagttgtagtcttcgcaacgaacggaaacccgacaacaaaggagaatatcgccaacgtctacggcgcgaagacacttcttgcgttgataccgctggatctggagctgcagtttgagccgtctgtagctgaaacgatgatggccggcgataagaagagcaacatccaagtgcgcggacacatctcgcgacctgttttcggcgaaggccgccagacgcctgatcggcagatgctctttgtgaattcccgcccctgtgcgttgccacaaattaccaaggcaattaatgaggtgtacaaatcgtttaatttggctcagtcaccatttgtcttcgcggacttccatatggacacgaatgcgtatgatgtcaatgtgtctccagacaagcggacgatcctgttgcatgacgccggggcacttattgagtcgttgaagcagtctcttcagaaactgtttgagtctgcggatcagactgtgcctcagtcacagattcttgggaagtaccgctcgctagacagcggtccttgccggaaactactaggtctgatcgagctatggaacaggaagcatcagaccgtgacgaacgtgaggggggcagtcaaccgaacccgcaagacaggatga

SEQ ID NO: 27648 - DNA, 702 bp, Emericella nidulans
gatgaggcacttcgtgatctcgacgagaaagagagggcattggacatggaggctctggctagccatttctctactttcaccgagcctgattctgtggatggtgacggcccttgcgaaaaaagccgtttctccgaatggagcactgatactgatatggtttcgccggagtctgtaacttcatgcttgacgttcaatgagaaagaggggtcactgaatgtcccagcaattgggctctcagagctgtccgacgcctccacggacaatgctcccagcgacccgaataccccacacctgaccgtgggctcgaagtctcccgctcaccatgaggactctccacgaatggagctccctgtcccgcgccttacaatcgctttatctccatcagacctcaacatccccgggctttgtatagacgaagaagacgaggaacttctcgagagtaaccccaagcgccatgcggcgttttttggagccatggagttgaaaggccttggcttatcgagccccccggcgacgacacttcattttcctgagggcgtccaggatgcgagtcctgacaggaacataacccctacgaatgatcccagccgttacagcgtgctcttgtcccagtctgccacgatgaaggagatgatcgatgaattgagctacttgaaaaacatgattcaatctgggtctgtgccggatcttactgaagattag

SEQ ID NO: 27649 - DNA, 726 bp, Emericella nidulans
actgacttcgcagagaaaaaccgccaggtgttcaacaaacaagccgctgcctacaagtctgacttcgaaggagcggtggaagcgttggtcagcgtcgtccacgaccaacgcacctgggttagcgatacttgggtggacaccgaggcaggaaaaggcaaagaaatcagggcactggagtatgcttgcggccccggccatatatctttggcattagcgccgtttgtcagtagcgttgtcggcatggatatctcagagaacatgcttgaagagttcaagaagcatgtccacgaagcaggccgctccgacactatggtcgcagtcaaggccgaccttgtttcagagtcctcgccgactgaaatttcgggccccgagtactttgatttcgacttggtggttgtcagtatggcgctccatcacttcgaaaacccggagaaagccatgaatcgtctctctgaaaggctaaagaaaggcggagtgatgatgatcatagatttgattcctaatgaccaccatgatcatgagcatgatcacgccttacaacaaatgggcgaggttgtcgagacgatatctaagcatggtttcagcctggacgagatgcggaccatgtacgaaaatgccggggtatgcaaaggattcaagtatcaagttcttgagaagcgcttgccgttcactaaaaacggcaaatcctttgagaagacgattttcattgctcgagggcagaagtga

SEQ ID NO: 27650 - DNA, 447 bp, Emericella nidulans
ttcggctttggagggctccttgccgacttccagcagcagaaccacctctctctcgcccagcagaaggtcagccagacacaactgctgatgtcgcaggccatccgccttgacccagaggtgcgccctctgccgcgaatgggcatcgtccagatcgatatgatcagtggaattctctgcgacaactatttgtttaaccttggctttctcaaaatgattcaagactcgtacgacgaagtgcagaacgcggagggattcctcaccggccagttgcggcaggcaaaatcccgcgagagcactttgcggtctcagttgcaggatgcagcacgacatttggagaatgctcaaaaggagctccgacgaatcagggaggaggctttcatgaaggcagcagatccgcctcccccttatgtagagaatgcggctcggacaatgcctgtgggcgagtag

SEQ ID NO: 27651 - DNA, 1086 bp, Emericella nidulans
gacgtcgtgtccgccaaaggcaaggggctgatcatcctgctgcatggagcgcctggggtgggaaagacatcaacggcagagtgcattgccattgagctgaaccgccccttgctatcaataacatgcggccatattggcaccgtcgcagaggaggcggaaaagaacctggactcgttttgtaaactagcccatcgctggaggtgtgtgctcctgttagacgaagcggacgtattcctggccaagcgagagcggggggacattgccaggaacagtctggtatctgtctttctccgggttcttgaatacttctccggggtcatcattctcaccaccaaccgtgtgggtgagttcgacgaagctttccgttctcgaatccacgtctgtctctactatcccaaacttgaagagcggcagacgaaagagatctgggagaagaacatccaacgtgttaaggagagtaacctcaacctggatatggaggagaagaagatacgacgttttgcagatcagcactggcaacggaatctggaccggccgacacgacgctggaatggccgccagatcaagaatgcttttcagacggccattgcccttgccaactgggaattctacgatgagaagaatgtcgcaaagctcgagagaccactgttgaaggcaaaacattttcaatatgtcgcaaagatcacggctcattttgacgactacattagcgacatttatggtacttttgatgaagatacctattcgttcttggctgctagggatgcgttgcgagtggacgaggcatccgccatgtttgcttcacggagcacgacgcaggagaattctcgtgcctcaaaatcgggcattgttcgccggggaaccgattttcgtagtcctccggctaacccaggcaagccgcaaggatcaaattttggccggtactctagtgacgacgacgaaagcacggatgaagaagaatcggaggagagtgaggccgacaatgaagaggatgaccaggcggatgaggtcaaaaagctagagcttcagcttcagttggcgaacgtaaagaataagaaggcttcgtcgagaggcagcaagaggtga

SEQ ID NO: 27652 - DNA, 1266 bp, Emericella nidulans
gagatatctgaaaaagaatcaaaccatcctagtcctacccctgacacctcgcacaatgacacccagctcggcacgaaagaggatatcgccagctctgatggtgcacatctgcagcgccacctcaactaccggcaggtgcagatcatggccatgggaggatccatcggcaccgccttgttcgtcaacattggcggcggtctcgcaaagggcggtcccttgtccctactcctaggcttcaccatatactccctgatcctctcctgcgtcaacaactgcatcgccgagatgaccgttctccatcccgcgccgggcggttttattcgcatggccgggatatgggtcgacgacgcctttggcttcatggcgggctggaacttcttcctctacgaagcgctaacgataccgttcgagatcaccgcattgtccatgacgctctcgttctggagagacgatattcccgccggagcagtggcggctgtctgcattgtatcttattccgtcttcgccgtcaaagtctacggtgaagcagagttctggggctccggcggcaagatgctgctcatatcgattctgttcgcattcacatttgtggccatggtaggcgggaatccgcagcacgacgcctttggattccggcattggagagaccccgggcctatggctgagtacctgagcgcaggcaatctcggccgctttgaggggttcctgggatcattatggatggccagcttcacgactgttgggccggagtacgtcaccctgatcgcagcggagacaaagcacccgcgcacatacgtgaagaaagcatttcagaccgtcttctggcgtttcctgctcttcttcatcatggccgccgtcagtgtgggcattctcgtgccatacgacgatcctgctctgatcgcaaactttgtcaccaacaccgccgatggcagcaaatccggctcctccccgttcataatcgccatggggaatctacagatctcgggattgccgcatgtgatgaacgcgctactcgtcacgaccatcttctctgcgggaaatacgtacatgtactgcgccagccgcagcccctacgccttgtcattagaaggccgcgcgccccggatcctctcgaaatgcaccggacaaggcgtgcccatctattgcgtcctggtgacgatctgcttcccgctcctctccctcctgcaactcggcgacgcctcgagccaggtccttacctggctcacgaacatccttaccgctggaggcctgatcaattacctttag

SEQ ID NO: 27653 - DNA, 543 bp, Emericella nidulans
ggtctccgtgtcaaagcccttgcagtggcagctctggctaccctcagccaggcctcgccggtcctatacactcgcgaggacactacctccaacacaacctacgcctttaccaacagcaacgggctgaacttcacccagatgaacaccacacttcctaatgtaaccatcttcgcaacaggcggcacaatcgccggctcggccgcctctaacactgcaacaacaggctaccaggcgggcgccctcggaatccagaccctcatcgacgccgtccccgaaatgctctccgtcgccaacatcgccggcgtgcagatctccaacgtcggtagcccagacgtcacctccaccatcctgctagagatggcgcaccgtctcaacaaagttgtctgcgaggacccatccatggctggcgcagtcgtcacccacggcactgacacccttgaggaaacggccttcttcctcgacgcaacagtcaactgcgggaagcctattgtcatcgtgggcgccatgcgcccgcaacagccatctctgccgatgggcctataa

SEQ ID NO: 27654 - DNA, 324 bp, Emericella nidulans
attactgctgctcgcctgattgcacacaagagcattaacggcaaataccagaccaagctgcaattagacaagttccctgtcctcggtcaccagatgacccattccatgtactccttcatcaccgactctgcaaactccgcagctgctttgtacggcggccacacgatcaccgtcaattgtctcggcgtctatgcggactcgtccgaggaccccttcgatgatcccaagttcgagcttcttcctgagatcttccgtcgccagcataacggtggtattggcattgtctctattgctatccttgctgatgccaccctggtgctatga

SEQ ID NO: 27655 - DNA, 471 bp, Emericella nidulans
ggtccactgcaaaacagcatgcagtatgaaaaggtcaagggattctttgccgacctcacaaaggaacagctcagccttacccacccggacggcaaggcttttgacaacaaggctggctactttatcaagcccactatcattgacagaccagctgaggacagtcacattgctacggaggagcaattcggccctattatgcctctgttctcctggagtgatgagagtgatgtcattgcccgcgcaaacaatacacaaatgggtcttggggcatcggtctggtcgagggacctagaacaagcggcgagaattgcagcaaagctgcaggctgggagtgtttgggtcaacactcattttgaagctgacctcagggcgccgttcggtggacataaagagagcggcattgggacggagaatggcttgcagggtttgaggcagtggtgtaacttgcagactttgtatcttaagaactga

SEQ ID NO: 27656 - DNA, 1605 bp, Emericella nidulans
gcttcctatctcaaccctctcgttatcttatctttggtctcggcggttcaagctgttcagccctccgctccggattttgtcgcagctcctttacgtgaactgaaatggggtcaaatcaacttccttcatacgacagatactcatggctggctggctggccatctctcagagtatgagtatcagtcgttgcttggtgatagagtagagggcaatggcctttacgattcgtcagaccctaaaggagaactcgtggagttgggtccccgatttaggaaattcaccacgaagaaccaaggcattcgcatcactgcctttggctttcttttcgactttacaaggaactataacaacacggttgtccatccggtggaggaagttgtgaaagagccttggttcaagcacgccattcaagaccaggccgtcgatctgtttttggtgatagggcatgttccagttcggtcaaaagagtacgacgcggtcttcaatgaaatcagagctagtcatccggacacgccaattcagtttttcggtggtcacctccacattcgcgattgtcatcaattcgactcgaaagctgttgggcttgccagtggccgatttatggaaactattgggtttgcgtcaattagcggactgtctacggagcgcaacaaattggagcccagcatggtagatcctatcttcgagcgaaggtatattgacaataatctcttctcattttacagtcacactggtcttaatgagagtacgtttccaacggagcacggccgcaatgtgtctcgtcttatccagcaatcacgaagtgcgctgaaactagacgaaatatacggctgcgtcccggagaccttgtggatgtcacgatctccgcatacagcctcaaataacatttacgcttggttgcagagggaggtacttccaagcatgctagacgacacatctcggaaagggaaaccagctttcgttatcttcaatactggcgccattcggtttgaccttttcaaggggcaattcaatcgggactcagtctatataatttcgccatttacaagtggctttcgttacctgaaggacattgcctatgccgaagcagagcaggttttgaatgtcctaaatcagcagccacaaatcttcacaggcgccgaagggacaaccgggcttctgctacgggctcttgcgccgccagagcaagctgctcgtgactacggaattgacctcgctcgactacatcgtgcagagtcgattctcaatattcccacaagtcagcatccgatgtcagttggccacgattctgagcatgagatcatacctggatatactacgacagatgatctaggtgcagatggtgatgatacagtccattccatgattgaattctatcagataccgaactgcataggtgccttgactcttgacggtggctctgctccgccagaaactgtggaccttgtgtacatcgatttcatacagccatatgtgagcttcgcggctgaccaagttgggctcggtgtcaatgtctctcaggacagtgaggtgtatatgccctctacttcatttacggatctccttgtacagtgggttaagactcactggggctgctcggtgtga

SEQ ID NO: 27657 - DNA, 1509 bp, Emericella nidulans
cgcgcccgcactctcctcctcagagtcagcatcttctcagcggcactcgctcttcaaccatcagcaccaggcccagctccttacaccgaaccttacagacctcaataccacttcacccctgctcaaaactggatcaacgaccctaacggcctgctctaccacaatggcacctaccacatgttctatcagtataatccgggcggagtcgcgcacgaggcaatgtcctggggtcatgcaacgagccaggacttaacgcattgggatgagcggcctgttgcgttgacggccaggggttttcccggcaagaacatatcagagcagtttttcagtggcagtgcggtttatgacgtggataactccagcggatatggaaatggaatgggaacggctgctcctatggttgccatgtatacgtctttccctccgcacccttacgaatctcagtataaagaatggcgtgaccctaatgtcttctggcacgcgcctacaaaaaagtggattctgacaactgcactgtccgatctgcacaaactccttatctacacctcgactgatctcaagaactggacgctcgctagcgagttcggtccctataatgccgtcggtggagtctgggagtgtcctagtttcttcccgctacctgtagacaacgatgagtcgaacgtgaaatgggtcgcgatcatcggcctgaaccccggcggtccaccggggacagtgggatctggaaaccagtatattctaggccaatttaacgggactcattttcttccggacgccgaaagtttgcatgagcaaggagaggcgaattggctcgattatggaccggacttttatgcggcgctcgtttataatggcctgccggagtttcagcgtactgttattgcatggatgagtaactggcagtatgccgagaaggtcccgacgacggtttggcgcaacgcaatgactattccaagacgccttggtcttaagactatcaatggaaaggtgctagttgttcaagaaccggaagcaaactgggctgctatcatgagcaagccacaaaccacgcgtattttgtctctcccggcaaatagcacgcgtaacctagggtctctagggaagacacttgctgctaatctcaccttctctgccggagaacaaaatggctcttccttcggaatctcccttttggcaacccagaacttcacaacccagacccttatcggctataacttcgccacgaagcacatctttgtcgatagacgggcatcaggaaatacctcttttgacgagacatttgcgtccgtttatcgtgccccgcttgaaccagcggatgatgggactgtgacgcttaggatattcgcagactggtcgagtgttgaagtctttggagggcagggagaaaccactctcacagcccaggttttcccgcccgagggagcgacacatgcaaggctctttgccaacggtgccggtgtggatgacgtgctactgagtgtgagtaaggttgggtctgtttggaactga

SEQ ID NO: 27658 - DNA, 1095 bp, Emericella nidulans
gtgaaacaatcgcttcctgcggtttctactgtgactgaagaaacccttgaggacttcaagaccatggataagatcgttattgtcggctactttgctgaggatgataaggaatcgtctgaagcttacacggcctttgctgagagccagagggataactatctgtttgcttccaccaatgacgctgcggttgctagcgctgaaaatgtgaagcagccttccattgtgctctacaaagactttgatgagaaaaaagctatctatgatgggtcgctcgactctgaagccctgctcagctgggtgaagaccgccagcactcccctcgtgggtgaggttgggcctgagacttactctgggtacatcgcggaagagcgcgctaaattcgccgaggagttcaaacccattgcagagaagcacaggggcgctatcaacatagccacaattgacgccaaggcttttggtgcccatgccggaaacctcaaccttgaccccaagacgttccctgcctttgccatccaggatcccgcgaagaacgcgaagtacccgtatgaccagaccaaggaactttcggctaaggatgtcagcaagttcattcaagatgtcctagagggcaaggttgaacccagcatcaagtctgaacccgtgcctgaaactcaagagggccctgtcacagtcgtcgtggcccactcatacaaggatcttgtgatcgagaacgacaaggatgtccttcttgaattctacgcaccatgtcttgcccccaaatatgatgaattggccgagttgtatgccaagagcaaagatttcgcatctaaggtcactattgcaaagatcgacgcgacggccaacgatgtccctgactctattaccggttttccgaccatcaaattattccctgcaggcgccaaagacgcacctgttgaatattcgggttctcgtaccgtggaggatctcgcaaatttcgttaaagagaacggcaaatacggtgtcgatgctttcgccgctcaggccgaggaggccgaagaagttgccgaagatgccactgagaccgccagcgacgctgagccctctgctgaaaagcctgagcatgacgagctttga

SEQ ID NO: 27659 - DNA, 561 bp, Emericella nidulans
tctaccgagatgtcgagcaatggcccttcgacggagctggatctttatgaccgattcctcgcggatattgacgcccgtgagcgtgaattttttggtgcctttcatagcccgcttttgcagttcctcctagaagatcgacgcagaggtcgattcggcatcttcccttccgaaaccaataacaaagacgacacagagagctggctagatcttgtatccggtggaaacaagcataccgtccctgaggccaaagatgagtctgagtctactgaagcgcatctctcccgagaaccagcatcatccccggccgctacaggagcccaggctgaaattccgccagttcagaactacgtcgtttcaaactcagtaagcacagagcgtatccgccttccagatggctcagtccaaactaagaccgtgcgtacgaagaaatacgcggatggccgtgaggaaaccaactcgtccactgaggttgtcaatccgccgcagggcgagcagggtcctgatcagcaatctggtcagcagcctaatcagacaaagagcgggtggttttggaaggattaa

SEQ ID NO: 27660 - DNA, 660 bp, Emericella nidulans
tctcccgcacacggtcactgcgatgcggcctttcagcccctccgcgatctgttcgatcagttgctgagtaatgaaagtgagctcggcgcatcgatttgcgttaacattgacggacgaaacgtcgtggatctctggggaggctattccaatgaagagcggacaaaggcctgggaacaagacaccatcacgaccatctggtcgaccaccaaggtcattaccgcccttgcagctaatatcctcatcgagcgtggtcttctagatcccagcaagaaggtgtctacatactggcccgagttcgccgcaaacggcaaggagaatgttctagtatcgcatgtcctgagccattcctctggactaccctcttgggagtcgccgaataccataaaagacatctacaatgctgagaaagccgcggagaagatagctgcgcaggcaccatggtggaccccaggcgagcagttgggctaccaccttgtcacccagggctgtctcgtcggggaactggttcgccgcactaccggccagtctcttgctcagttcatcgccgacgaaatcacggagcctttagcgccgactacagacttggggttccagaacccgagtggccgcgtacggcagatatcatccctccgcctccgcccgaaccaacccccgcgttag

SEQ ID NO: 27661 - DNA, 762 bp, Emericella nidulans
attcgcgaacaatcggcagacgccgacgagcatgatagcgagctagattcggcttcagaagcatccgcagaccaccagggtcacgaatccctgacacggagcgagctgctcaatcgagacaccattcttctccttttgacgtatctcattttcgccctgtgcaatatcgccttcaacgcgcttttcccgatcttctcccaagcagccccgcctattgggcgtggtcttacaccgtctgagatcggtcttgcccagggcttcgcaggcgtcgtgactataatcttccaaatatgcatttttggccagctgcgcaacaagatgggaaaccggtggtcctaccgagctggcctctttggcttcgtggtttccttcatcctcatgccgttcatcggatacaaaggcgatgataccgggaagactggcgtcaccggcaagacagccttcatggctatcgagctctgtctcgtcttactagtaaagactgtcgctgctgtcggcggcttgaccagcgcactcctcctgatcacaaattccgcccccgaccacgccgtcttaggcgccctcaacggtctcgcccagaccctttctgcagcaggccgtgctgtcggtcccttcctctctggcagtctcttctcccttgcagcccgcgtccagccaaagggcgaggggcgcaagttggaggctgacgggtgggagagtaatcctgacgacgatgacgatgatgatgatgggagtggaaattcagatgacgaggagaactga

SEQ ID NO: 27662 - DNA, 570 bp, Emericella nidulans
aaggcttttgccgaagagaacgagtacgacaccgagcccaacgaccagggtgagatcgagaagcgccccggaaagctgtccgactacatcccccctccttacaagaacgaggaggctgctcgctttgcgaacggtggtgctttgcccccagacctcagcttgattgtcaagggtcgtcacggtggctgcaactacatcttcagtctgctgactggttaccctgatgagcctccagctggtgctaccgttcaggagggcatgaacttcaacccctacttccccggcactgctgaccatttcccagctattgccatggctcgtgtcctttttgatggtgttgttgaatacgaggatggcacccccgctaccacttcccagatggccaaggacgttgttgagttcctcaactgggctgccgagcccgagatggacgaccgcaagaagatgggattcaaggccatcactctccttaccggtcttttcgctcttagcgtctgggtcaagcgctacaagtggtctcccatcaagacacgaaagatcgtgtacagccctcccgttccccggcgctag

SEQ ID NO: 27663 - DNA, 1224 bp, Emericella nidulans
ttcaagcccgaactccgaaagcaacgaatcgattttcggtatcagctcgacaggtcttatgctgatcaagggcttgactgggttctggcggaccttgacaaaatgggccaagttttgatcaacctggtctccaatgcgatcaaattcactgcccaagccgaaggcgagagaacgattcgagtctcgatgggtgcttccaaatgccgtccaccgtcatacccgccaaacgttgtcttcttcgagccgaatgaagaggcattaaaactcgactcgacccaggacccggaatggggccatggcgagacggcatatataatgctcgccgtcaaagatactggaatcggcatcagcgatcagcagcaaaagatgttattcgagcgcttcaagcaagcgaccccccgaacggaacggatatacggcggctacggtcttggactgaacatcagtcgaagactttgccatatgcatggtggtgatattggggtcagcgctaaagaaggcgaagggagcacgtttggcttcttcttttccgtccgactatcctctgaagagcaccctcaatcttcagtagtatccaacagagaggcgtctccagtcgatgaactatgttatcaaatcaatgagcttaatagcaagattccggacgtgaggaatgacacgtcgatggcagacttcgatgaaaaaccaacagtacaacaagtcaacgaggtcaccaacactcccagcgacgaacgcaagcaacattcactaaagctggcaaaggaagtcgatgagaaccccggctcatctactgatgcgcaaaagtggggtagagcccggtgcgataccaccatgtcgaagctcgtcaagggccctcgcgtcctcttcgtcgaagataacgtcataaaccagaaggttgtctgccgcaaactaagggtatctggatttgaggtgacgacggccaacaacggtcaagaagcgctcggcctgtgggatagtgacaagttcgactgtattttaatggaccaggaaatgccggtgatggatgggaatacggcgacgcgggagattcgagccatggaaaaggaaaagggctcgcatattcctatcctaggagttactgcaaatgtccgacaggatcaacaagccgatatgctcaatgctggaatggatggaatcatccacaagccttacaagatgcatgagctgtgcgagaagatccacgatatgctgcctgaggcatga

SEQ ID NO: 27664 - DNA, 729 bp, Emericella nidulans
cacgtagcccctagttcgtactgcaaccattcggctttccaagctgctgaatatgtggagtttattattgagcctgatctcggctatttcctcgtcatgcaagcccgctatgccgctccattcacaggcggttcgactgcgataggtggccttcgtcgtgccctttactctgctgctgtcgagaccggatctcagcccgctgcggtaggatttgacttcctttggattgtcgactttcctcttttctctcccagcagcgactcggaacccggtcaaggcggtgctgccgggatatcttctacacatcaccctttcactgcgccaaaaagtgctgccgatgtggatttgcttcttacggacccaacgaaagtcgttgcagaccactacgacctggtagtgaatggagtggaacttggtggaggtagtcgtcgtatccatgatgctgctgtgcaggaattcgtcctccgaaacgtccttcagatgccacctgagcgactaacagagttttcccacctgctagaagcacttcgcgccggatgtccaccacatgctggactggcactggggtttgaccgcctggtagccgtcatgctgggcaaggactctgtgcgggatgtcattgcttttcccaagactggaaaactcggagaggatccgatggttaaggctcccagcccggtttctctggaggctctgaagacgtatcatcttcgcttaactgatgagtaa

SEQ ID NO: 27665 - DNA, 894 bp, Emericella nidulans
acgtccatcggcaccggctacgatctatccaactcagtgttctctccagatggtcggaactttcaggttgaatatgctgtgaaggctgtcgagaacggtggaacgtccataggcatcaggtgtaaggacggggttgttcttgcagtcgagaagatcatcaccagcaaactcctgaagcccggtgcgaacaagcgaatatctactgtcgatcgtcacgttggcattgtctcatcgggattggctcccgatggtcgtcattttgtttcccgtgctcgcgatgaagcgtcctcatggcgtgggatttacaaaagtcctattcccgtttcggctctagcgaaccgtcttgggggctacgtgcaagcatacaccttgtactcaagcgttcgaccatttggtgttacttcaattgttgggggctgggactctgaggctgagcttgcagtcgatggtcaagtgggaagtggaccgcagtcaggttctggcgggaaagtcgaaggcgcgaaatcgggaggaccaggtttatatatgatcgaaccaagcggtctgtattgggggtactatggggctgcaaccggtaaaggaaggcaggcggccaaagccgaacttgaaaagctagacctggcttcggagaaactcagcctgcaagatgctgtaaaggaggcggctaggattatctacgttgctcatgaagataacaaggacaaggaatttgagcttgaaatgagctggattagctcactgaatggtccaacaaaaggcagacacgaagaggtgccgaaagaactactcgaggaggcagaacgagcggctaagcgggcccttgaaggagacgacgaggaagaagaagatggttcgaaagcaaccggcaatgagggcgagaggatggaagagtga

SEQ ID NO: 27666 - DNA, 984 bp, Emericella nidulans
cctcaactgaacggaaaagaagttggccctatcggccttggcctgatgggcttcacctggcgtcccaacccgtgccctcaggagcaggcttttgagacgatgcgggcagcgctgcgaaatggctgcaccttttggaacggcggcgagttctacggtccgcagtcctacaatagtcttgtcctgctcgagcgctacttcgagaagtaccccgaagacgccgaaaaggtcgttctgaacatcaagggcgggttcaacacgtcgactttccagcccgacggctccgagtccggctcgcgacggacactcgatgacagtatcgcccagctcaagggccgcaagaagattgaccagtttgagtttgcgcggcgcgaccaaaccgtgcctatggaggtgacctttggcgtgatgaacgagtacacccaggcaggaaagatcgggggcgtcgccctgtctgaggtccgtgccgagacgatccacgaagccgtcaagcatacgaaggtccttgctgtggaggtcgagctgtccatgttctccaccgaccccctcgagaacggggtcgccgccgcatgccatcaatatggcatccccctagtcgcatactcgcccctcggacacggcctgctcacgggccagatcaagaagctggaggatctccctgaagactcgtttctgcgcacgtacccgcggttccagcctgacaccttcgagatcaacatccagctcgtccacaaggtcgaggaactcgccgccaagaagggatgcacgcccgcgcagtttgccatcaactgggtgcgctgtctctcgcgccgaccagggatgccgaccatcatccccatcccaggggcgaccaccgtcgcgagggtcgaggagaacagcaaggtgatcgagctcactgacagtgacatggacgagatcgatgctatcctaaccaaatttgaacctgcgggcgagcgatacccggagggggtgccgacccatacatag

SEQ ID NO: 27667 - DNA, 396 bp, Emericella nidulans
gcctaccgcaagaacaactacgccgaggctgtgcgtctgtacactttcgcgctcgaaatggcgctcgcccggcccggctgggagcccgttgccgtggctagggaggaactcgctgcgttgtatgggaatcgcgcacaggcgtacatgtcgcagcagatgtgggttgaggggcttgtcgatgccagggctagtgtcgagggacggcccgtgaataatgttaaggcttggtggcgcgggggaaagtgcttggttgaaatggggaggtgggaggaggcgaaaagctttgtatcgagggggttggagcttgagggcaagaacagtgagggcgcgaaagaattaagtcaactgttgacggaggtggaagaggggttgaagagggagaaggggagccaatag

SEQ ID NO: 27668 - DNA, 453 bp, Emericella nidulans
tctcagttcaaagctcaggctgagaagaacgctgaaaaggagaaggaaaaacgcaaggcggaagagtttgactccgacgaagatgatgaagcagagtgggaacgcaaagacgccgaaaagcagcgaaagaaacgtgaggaacttgaagcgcaacagaaccgacgcgctaaattcgttcccggtcaaggattctcttttgaaaattcagctacagaagaggaaaaatcgaacacgagcgctgcctcgtcagtcttggattctaaaccaaactccttttcaagctctagcaacatattcggtcatttgtctgcaacaccatctgaaagcggggagaatgagcacgatgccgctgacgacacggaggaagactctgttaccggtgatgatgccgttagagaatctcttctgcgccgacagaagaccttcacgcaagtcgagctgattccaagataa

SEQ ID NO: 27669 - DNA, 1536 bp, Emericella nidulans
gcgtcggctactgagtcttcccctctgctccctcaatatcaccatgctgcatcctccaatacgtcaccgcgagggaaccggcctcctcgtactgtgacgttcaatcccctcacaaccgtcagtacataccacgactcagcttctgcagatccgaagtttaaacctttggcttctggcaattcttcactcgccaactcaagaccgactgggctatctgctctgaacagcaacgttcgccgtcgcaacagccatggagctcctggctcggtcgcttcttcgtatccagcctcaaagatcgggccgcagagaacgacaaaaactgcgcaaaaattgaaacttctacccgaccctataacagaggaggagcttgttgatgaggagacatctccctccgacgtatacagacaaatcgcgcggataaaggaacctgctgctcgaagtcttgcggcgaagctgggaaaggcagatagagacagattaccccgggtaacggcgtactgtacagccaattcttatcgtctagacggcgtgttcaagttcctaaagtcacggtccaaaacacgcggtgccaatcccaaattgttcgatgaatgcgtctactcgcggtttgactaccagtttgaagcaaaacagaaagctggaaaccattccaataatgtcgattcggaaaacactcatacggtcgataggatgcctagggaacgaaggttctcggacagtgcggtggaggtcaacgaggacttcggcaataggcgagaggagctcatcgacttgcatgatcgcgactcccatcaacagaatgcgacagaagcctctgtgctcgataatgccccggatatcgacaccactattcatgctccggaagtgtttcttttcgattatggcactgttgtcatatggggcatgacacctgcgcaagagtctcgatttttgtcggatatatctaaatttgcaacctcaattctaagtccggaagacacccaggtggagaacttcaacttttattatgcccgcgaataccaggcccgaatttacaacgatttcatttctctgcgcgacccccgaaactatatgattaagctcgccatttcacatgcactagctcagtcggtgaagacgtctctctttgaagatcttgtatccgaaacaatctcaaacacggcgccattgccggcccagatcgcgcaaactggaagcgtcaacctctcaagacggcagatcaatatgcaagtcggagaactatttatactacgtatcaatatccaccttcagggctcggtgttggatagccccgagttgatgtggcagagccacagctggagcctgtataccaagctttacctggaaatggaccagcgcgtgagtcttttgaccgaacgattagatgtaatagcagatcttcttgctgtgttgaaagaccaattaactcaccgtcacggtgagtaccttgagtggatcgtgattgtcctcatcgcagcagaaatccttgtggccgctatcaacattgttgttgatctctatgctggcgttgaatag

SEQ ID NO: 27670 - DNA, 546 bp, Emericella nidulans
aaatatgcgctgtccgggaaacgcgatgtcgcctctgaagtcaccaagggatacgtcaaagcctggaaagatgctggtggaggcatcataacgccagaaggtggttttaacaccttctaccgcagcgacatcaagcgctcggtcgtcgtccccggacccagtggcgacgcatggtgcggactgatgatgaacgcatggaaccacgagctcgtgcagagagtctacaacgaacggatcagcggttctgtcgttgcgcaagaggacgggacattttccgttgtgacggggggtattgagtatagcccgctcaatcggcgacttatcggatccgggggcctctttggctggattgcagcctgggctgcagagatgggagacgaggatacgaagaatcgtctactggcgtacgcggacaaatatctcaacccgacggttgtaaagggagggctcatgtacccccgccccgacagggtctatgatgaacaaggaaagttagtgatggttacgccgatcctctcaaatgcgattctcccgcttcgcggttaa

SEQ ID NO: 27671 - DNA, 1335 bp, Emericella nidulans
ctttcgaaaacgctcattgtcctggcgatcgtctcttggctaatcccattgatggctattgtcacgccgtctactctctatgtcattgccttgccaacctggcagacttcccaacttgaagttccaagcgtgagctttgctaaatccttctggatcggcctggtaacactcgagggagcaggatacatcaattcaccgtcgcccggcatcagccgcctcttcacaatgatcgcctcgtctatgcaattgccttcagtccctgcaccattccccagatcatcctacacgctaacattctggggcccctcatacaagtgccagagccttagcgaacgtctcttagacgtgcacgggttgagccaggcactgtgggatagcgagatcgggaacacaacggaccagtcgcgcagagcttattccggggttgctcctcaagatcttaacaatacactttttgtatgggctgcagggcagaactcgctgtggaacgatgacgcctcgcgaccgaccgagctcgtctgccagctctggaatacctcctacgtggtcggcctttctttcaacgatggcattcagaccctaacacctatatcagtagatcacgtcgcctattccaactggactgcaggcgctggttcttcctctctactcgaggatataggcccgacagtgaatggggggttctacgtggtacatatgctattttccggccttatccagggtgactggctcactggttctacggggtcagtggcagagaacataacctcacagacggcgttcaccaaattgtccatcgcacagaccggcctctttgcatgtccggagatgtggaataccagtcaatatgattaccttcgcggcgacagctcaaccacttcttgtcggaacagaacactggctcgagcaatcgaagatctctcgcaaaatttcacctacagcctcctcaatctcaatgccgcaaacaccactgtcgacgtgctggacttgacatcgcgcaacttctaccagtacggtgagggatatctgatactagcctacatgactgcgattggagtcactgttgcgtgcgtcattgttggattttttgccctctggcggaatggtgtctcacagaacacctcgttttcgagtgtccttatgacaacgcggaatccggagctggaccgtctggccattggccattgtctgggatccgagccgttgaaaaaaagaatggggaaggtccggttgcagtatggggagattgagggctcggatcagcggtataagcacgcggcgtttggaaccaagggatcggtgatggctctgacgaagggagagcattattactag

SEQ ID NO: 27672 - DNA, 801 bp, Emericella nidulans
acgctccccgcactcgtcctcgccctgtcgctcctcagcgcaaacgcaagggaggcagcggctttgagagatgagcctactatcctccggcgggcctgcccagactatctttcttactctacagctcctcaaactttcaattcgtcagcagtcgagcaggttattgaagacgtcacatctcgcatgattgacaaagatctcgcccagctgttccgcaacgccttccccaacaccctagacacaacaatccgctggcatattgatgggttcacaacagcgatacggcaaagcaagagcaagaaacagaacgagcaatggactggcccgcagacctttgtcgtcacgggagacataaacgcagaatggctccgcgattcaacaaaccagctagccaactaccagactctagcgaatcgagaccggcgcctctacaacctaatccaaggcgcaatcaacacacaggctgagttcgtcattcagtcgccctactgcaatgcattccagccgccgcctccgagcaatattccacctgaagcccataaccaggatgaccaggtccatcccgcgtacgaaccgtccgttgtgttcgagtgcaaatacgagctagattccctagccaacttcctcgcccttacagcggatttccacgaaaacacagggtcaactgactttctcacaagccgctggtatacagcgcttgatacgcttctcgccgttctagacgcgcagtcccagccaacctttaacacggaaggccagttcgttcgaaccagtacactttccaacggaccacaaccctaa

SEQ ID NO: 27673 - DNA, 483 bp, Emericella nidulans
ccctccatccgcaccctcgccctgggcctcagcctcgccctcctggccacaaccaccaccgccgaacgccttaaggtggtctggtcgtccggctccttctccgccattggcgaccagtccggcaactacaacagctttgccatcattcgtgagaacggcgaggccatctacaacgatgggtaccccaaggacaggtccccgtgcttcaacacgggcgacggcgcacattccaaatcgagggcgactgctgggcctctgttccactgcttgagtgactttggcggctcgccgaccaactgtgacgtacgcgatgagaacggcaatgtgctgggcactggtgttggacagaaggagactactttcattgggatctcgattggaacggatgcatcctgtgtcgtggagtttgacagtgatgatgcaggtcactgccctgtcgatgatgggaatgggccgctgcatgtgaccaaggacgacctctag

SEQ ID NO: 27674 - DNA, 1284 bp, Emericella nidulans
tctcaactcaccaaagactcatctattctcatcatcggtggcgttgcgcgagccggctacaaaaacgtcaccgtccttgagcgcagtccgataccgtcaccctctgctgccggaaatgatgtaaacaaaatcatggaggagggcgcaccgtccgacacagacacccccgagcaatacgtctggaaccggatgcaccagatcaccgccaatgcctggaagaccgaccccgtatttcgccccttctaccacccaacaggttttattatggccgcgagccaggacgatgcaatgcctcatgttgacaagtacattagcacctgcagagataaactccggttactcaactcggccgcggatttcagagctacaatgccgttgggcgtcctgacaggggacttttccggctggaaaggtttcttccgcgaggctggcgctggatgggtatttgcgaggggggcgctagaagcggcctacaaagaggcttcgcggctgggcgtgaagtttgttacgggtgacgaagggggtgtcaagagccttctctacacggatgaccaaagcgacatcgtcggcgcaaagaccgccgacgaaaaagagcatcgtgcagaccgcgtcattctctgctctggcgctggaagtgaccagttacttgactttgagaaacagttgcgcccgacggcttggacacttgcgcatatccagatgacggaggaggagaggaagctttggaaggatctgcctgtactattcaacgtcaattccggtttctttatcgaacccgactcgacggggcagctaaaattcgtcgacgaacacccgggctactgcaacattcccacctccgaggtcttgaatgacttccctaagtccattccattcgccaaacatcagatcccactacagtccgagcacgcggcacggcagttccttcgcgatacggtcccccagatagcggatcgcccctttgcctttgcgcgaatctgctgggacgccgacacgccggaccgccaattccttattgatcagcatccgaagtacaagtctctcacagttgcagtgggaggttctggcaatggctttatgatgatgccggctgtggggattgccattaaacagaggctggagggcgtgcttgaggagaagctgaagtatgcgtttcggtggaggccggagacggcagtccacagggactggagggacactcaggacaggtttggcggcacgggaaccgtcaggaacttccaggacgtcgaggtttggacaagggttggggaggagataatttag

SEQ ID NO: 27675 - DNA, 408 bp, Emericella nidulans
ggttccaatcggggcgaagttgaccccacagatctgccttaccgtacactgacggcagatgccaacattgaagagtacgtccaggagacgcagaccggtgagatcgccaaacctgttcggacggccgatggtaggacagaagactacaagctggttaccttcaaagtcgacgaccctgaaaatcccaagaactggccgaaatggaagaagtggtacgtgactatggtcgtggcgtttacctgcttcgtcgtcgccttcgccagtagtgttattaccgccgacatcgaaaggcccgccgaggagtttggtgtctttcgtgaagtcagtcttgttggggggaccggggttggtattggatttgggggtggcatggctaagaatggttcttcgaggaaggtgcatgggtaa

SEQ ID NO: 27676 - DNA, 897 bp, Emericella nidulans
cccgacatacccagtgacgaagaagactcgagaaacgcctccctagccgcccaggcaaccgcgcatccgcaagcgcaacgctcaacacgcctcggcgagccgcccagcaagcgacgacgacgtggtcgaggcaaacaggatgtcgacgtgcaggattttgtcccgaaaggcgcgacattcagtgcgacttcattagagatcgatccggagagtgagagtacgtcggcctcagaatctgaatcttcatctggaagtgaaagcgaaagtgagagcgaaagtgagagcgagagtgagagcggaagtgacagcgagaaagaaattgagcctgaaatcgaatcacgcggtggtggactgagcgcgcctgcgccgaattggaataaaacggggaaaagcgtgatcaggacgtctttgcatggtcggcaagctgccaacgcgaacctgaacggaaatggaaaaaatgatgctgagtcagagtctgctgcggcaaagaaattcgaagctgtgaatgggatgtattggcgaagtcgaagctcgtctgcttcaccaggctggaaggaaagaaaaacggtagaagaaggaaagagtgaaacggcggtaactgatgataacgatgttcagatagaggatggagaggtgaacggggtccaggaggtctctgcagactctcagtcagacgactccggttccttggactcggaagcggacgattccatcatgctgaacattggctcccggggccagaaccgcagccaacacgacgtaattcagatttcggatgacgatagcgacacactgggtgacggctatgatcctgagtctttatcggtttcgcagacgcctgctacggttaacatccttgatggctctaatggagacggggtagacggggaatcatag

SEQ ID NO: 27677 - DNA, 1692 bp, Emericella nidulans
ccaacagagagcccagccgcctccagtagtccaacggcacccatagtccggccggctgacatctataagcggatgcgagaggagcagcaggaccgccgaccatccccggctgcgccatcgacagacgaacgcgcttcaggaggtgttacagttcttgagtcttccgagaacacagtccctcctgccgctcaagccccagagcctatttacgaagcagaacaagccagtgtcaagaaagcgagtacccccccggcagcatcgaacgaccccccggccctctcattgccagaagtgaagcgcttatccgcgttcggttctggtttcttcagtgaacccgaacgcgaccctcagaacaaccaggaaccgggagatcaaccacatcagttacatcacaatccgtctctcggcttccgctccgccgtcaaccaagcttgggatgtccctgaaactccaagtaccgttgctgacagcatagctcgctcaaatagcgatagcacggtgggcataagtcccatcattccccgtcgcgggaataccgatgacaaaaccccgaccatccacgaagagccgaatgagaatacagaaacgccgaccgaaggcaacatggtcttcaagccagggcatcgccgggatctaagcatacccagccctggcaacagtccttctcgcaggccggtcgttgctgggcccgatgccactgcatcgtccgaactggctcaaatatcctctggatcaccagtggagtcccctctggccacgcagcctcagcagcacgtctttaacccggatatcccacaaccctctcgggaggctacgaggggtgacttgcctgcacctcttaacgttcagacaaatattgtctctaatccggctgtatcaacagacattcctgtaatcataccggcaatgagtacggaaaattctcctgaagatacggagaatgatcggttaagaaaggagattattcgttccctaagcagagagaactcaccctccgacaaccaggagaatgcacgccaccccataccagtggagagaataatctactcccgagagaatatgagcccacagggcggcaccgcaaaccgcaacttccccaggcctaaactcaaaaaacgcttctcctgggaagaatcgtctgaagacgaggatcctgttcctgtcacacaagcccagcccgctcgaccgccaccgatgcccgggcagttccccttttcgcaagatagtgtcctcccggaatccgtggtagcgcccacgaaacaacaatcagagatagcagacgcgtcagaggagagggttggacctcctacacctgagaaacctaagcttactctcgtaccgccagtggcgatggatgctcctagcattccattgagtgaccatggccatgagcctgccctttcccagactacagagacacttgcccgggccgaagagggagactcgtccagccatatgccgccaaccctggaacgaccaacgcacacaccgcctgtgtctgacgagacaggcctgctaggatttaaagacattctcaacatgcagtcaccgtacgaacggattcagtcttttgaccgtacgcgagatcaatttgcaaccatcaataccggtctaggaaactggcttcaggttacgttccatgcccatccccagcatcaccatgtcataagccgcaactcaaaacctctataa

SEQ ID NO: 27678 - DNA, 582 bp, Emericella nidulans
acgatatgctccttgctcgtgattggccgcaaacacgcggagttcgctgtcgctggtcttctcggcgtcgttgttgtccaaggtctcggctacggacttattttcgatctcaatttctttctccgtaatctgagtgttgttggtggtctgctcatggttctctccgactcatgggtccgcaagagattcgttcccgccggactccctcaattggatgagaaggaccgtaagatgtacgtccagttcgctggtcgtgtactgctcattttcctcttcattggcttcattttctccggtcagtggagtctctggcgcgtggttgtcagcctcttcggcttcgtcgcctgtgtcatggtcattgtcggcttcaaagccaagttcagcgccatcctcctcgtcctcctgctgagcgtgttcaatatccttgtcaacaacttttggacgctgcaccctcaccatcctcacaaggactttgccaagtacgacttcttccagatcctgtctattgtcggaggactgctcctcttagtgaacatgggtcctggccaactgagcatggacgagaagaagaaggtctattaa

SEQ ID NO: 27679 - DNA, 1224 bp, Emericella nidulans
ggtgcggacgagcctaatgcttgtcaaacgagctacccatatatgaacgagaaacctcaaactgccggactggtaggcgagggctccagcgaggatgtgagttccctgagagattcaccgggcgacgaggagtcaggggtgggacacggtcagggcaaggacctcacgaagactgctacgaacgtgagccatgttggcgcattcgcagtcagggctctttcgatcgtccgtaccagagaatccggacgagacctcggccctcctccggatggtggttttcttgcctggtcccaggtagcattggcccactttgtcatattcaacacctggggctatataaactcatttggcgtgttccagacgtactatactgagactctagggcaatcaccgtccgccatctcatgggttggaagcattcagattttcctgcttttcttcatcggcacattctcaggccgtgcgacggacgctggctatttcaagctcaccctgacgacaggggcagttctggaattgttttgcatctttatgacttccctctgtactgagtactggcagcttttcctcgcacagggtgtaggacagggtataggctgtggtctgatgttttgtcccacaatcgctctgacaaccacatacttcagcaagaaccggtctatcgccattggaatcgttgcctccggatctgcaacaggaggtctcgtctttccagctgttgttatgcgcctgctcccgcgggttggatatggttggacgatgcgaaccctggggttcatatctttagcaacaataacaccctgcctattcttcctgaaacaacggctaccaccgcgtaagagcggaccgcttgtggaatgggccgcattcaaagaagcatcctactcgttcttcgccatcggcatgtttctcaatttctggggactatatattgggttcttttatattggaagctttaccagggaagtcatcggcgcgtctacgacgacctcaatcaacgttctccttctgatgaacggcatcggtcttctaggtcgtctcggccctaatctcacggccgaccggtacactggaccattgaacatgctgatcccgttcacgttcgcgaccggtctagtcgccttttgctgggcgggcgtgcgtaatctcggcggggtgtatggctttgctgcattttatgcttggccgccgcgggaatccagtcgctctttccagcgacattaa

SEQ ID NO: 27680 - DNA, 624 bp, Emericella nidulans
gatatcggaagaatttttgcccccaacatatctgggtcgtcactggccccgccggaagcggcaaaagcaccgtcggcctgctacctccagcaggaattgggcgtgcccttcttagaaggtgatgattttcaccccgccgccaacaaagccaagatgtccgccgggacgcctctcaccgatgcagaccgctgggactggctcatctccctgcgcagcgcggccacaaccctgctcagcaccccagcacccacatccacgaatcccacgtcgacatcaacgcgagcgcaagctccaaccggtgtcgtcgttgcctgctccgctctgaaaaagaagtaccgcgacgtgatgcgcgtcgctgcctacgggtcccccaatgtgcgcatccacttcgtctacctgaagctcgagcctgcgacgctatatgcgcgcgtctcggccggccaggcgcattatatgaagcagggcatggtggagagtcagcttagagatttggaagagccggggcagggagaatgggatgttattactgtgcctgtgcaggtgggcatgggaatgggagaggtgcagagggaggttatgaatgctgtagagaaggttatacgtgggtacgagggaggtttatag

SEQ ID NO: 27681 - DNA, 366 bp, Emericella nidulans
gccttcaagaacgccacccagcaagctttccgtaaagctttccaggagggaaaccccgccgtcctcgagcctatgatgaagactgtggtcactgcccctgctgagttccagggtgatgttatcggtcttctgaacaagcgcggtgctaccattaacgattccgaagttggtgtcgatgagttcaccgtgtacgccgactgcagtctgaacggcatgtttggtttcagttctcatctccgtgctgcgactcagggtaagggcgagtacaccatggagttcagccactacgaaaaagcaccacctcaggagcagagagaacttgtcaagaagtacctccaggcccaggctgacaggcataagaaataa

SEQ ID NO: 27682 - DNA, 1125 bp, Emericella nidulans
gctgcagttccgaatgatgacgagttgccaatgactgaaaactcaagatatggccatatacgggatccagagcacatggcgccagattcttctctggcagagccggacggaaattacatgcaaatcccaggaatacatcgctcgaacgaacaatactttgtggacccacgcactgacctcaatactggagcaaaaatcccggctgtcggattcggaacatggcaggccaagccattggaagtggaaaactccgtggaggtcgcgttgaagcagggttaccgtcatattgactgcgctgccatctatcgcaacgagactgaagttggcaatggtattcgcaaatcaggcgtgccccgtgaggaaatcttcctcactggaaaactatggaacacgaaacatgcgccagaagatgtcgagcctgcactagataagacattgaaggatttgggtgttgaataccttgatctttatcttatgcactggccttgcgccttcaaagcgagtgacaaatggtttccccttgacgacaacggtgtattccagctagccgatatcgactatgtcacaacttacagagccatggagaaactgctgaacaccggcaaagttcgcgccattggtgtttcaaacttcaacgtccgccgactcgaagatctcttaagcaaggtctccgtcgtccctgccgccaaccagattgaagcccatccgtacctccaacaacccgaccttcttcgctactgtcaaagcaaaggtattataatcgaagcatactcgccgctagggaacaaccagaccggcgagccgcgcacggtcgacgatcccgtcgttcatactgtggcaggccagctgagcatggaccctggcccactactggccagctgggccgtgcagcgtggaacggttgtcttgtccaagagtgtcacgccgtcccggattgcggcaaaccttcaagtcaagcgcttacctgacgacgcgtttgcgactcttgcagccctcgagcgccataagcggttcaactttccggctttctggggctatgatatctttgatgaggctggggaagaggccgtgaagaaggctgcaatggatgctgctcctataaacaagacaaagtttaccgtttag

SEQ ID NO: 27683 - DNA, 381 bp, Emericella nidulans
tccaagctccaagccgagaacttcgcctaccccttcaaggaatgcaagaccccagtccagcacgcgtaccagctcatgggtaagaccgagtatgcaaaagagcatacctactcaatcatggccgcagagggacgcctggatagtttcaaccagtttatgcagggaaaattcttcaagcccagaaaaacgcctgaccgtctccaggcgcttggctatgactttgcagcagttgctcgtgaagccggccctttaacgtcaacagtcatggtcgatatcggcggaggtcgaggcgagttgcttcttgaactcaaagccgccctcccacagttcactgctgcagatctatatcagtggaggagtttcagtccgacaacgatttga

SEQ ID NO: 27684 - DNA, 591 bp, Emericella nidulans
gctccatcagaaacctccatcctcagcaacttcttactgtctgctgcgtctttgccgcaaattatgtcattgaagcagtttacagggctgttcccaaagcgtctgcagtcacatccgcatatcagggttctttaccgtgaactacagcaactgcgagagacagacatggacatagtcaatgaaaacattgacaaagaagtccgtctaggggatgctcaaaaggcagaactccggaagtccattgtaaaaacaggtgttgatggctcaggcgccaacgaccaacgggaaatggacatggattttgagttgtttggtccaacgtcggctggctctgacgagcagcactcagtctcaagccttctctccgcgatggaggcggcctgttctgatatcgagcgtgaaatagctggagtggacggagaggcggcctctcttttgtcggagctcaattctactgttggtgaccttagtgacctgcgatacgggaagatgcacggctcagttggagccacagacgcagaggtagtcagcgaggctatccggggccttgataaccttgaggacgcatgctcccgtaagagcgctgtttaa

SEQ ID NO: 27685 - DNA, 483 bp, Emericella nidulans
  unsure (1)..(483): unsure at all n locations
ttgataggaccgggcacaggtgttgcgccttancgatccatgctatgggaaanagccgcgatcgtcaagtcctatctagagaaaaaccccggcgtagatccgccaatcgagcccacgattctcgtgtacggcggtcggaatcgagccgcggacttcttcttcgaagacgaatggcagcaactgagcgacttaatcaaactcaaagtcctgacggcgttttcgcgagaccagaagcaaaaggtctatgtccaggatgttattcgggagaactcaagcctggtctttaatctcctgcatgacaagggaggtgctgtgttcgtttgcggctcctctggacggatgccccaggctgtccgggagaccttgacagaggcgttccagtacggaaacgatgccgggacacagccgttcagtcgacgagaagctgaagattacctagttgggatggaaaagacaggacggtataaacaagagacatggtag

SEQ ID NO: 27686 - DNA, 900 bp, Emericella nidulans
gcggcgtgcgccatcaccacggcgctgattgccgtcgccatcgtcgggctccgtctgtatacgcgcttcttcctcacggcggcgcggttccagatcgacgatgcgttcgtttgcttcatgcaagctggtgtcggtttgcacatgtgggacgtcactatggcgcagtataaccctggtctgggaatttggaccctcgtagcgacaatcttctacgcatgggccgtgatcctgtccaaactctccattctagctttctatctgcgcctctctccccagctctggttccgcgcgctcacgttcgtactaatggggatctccacctgctacgtcctcatatacaccttcctcttcatattccgctgcaacccgatccccaagaactgggacatcaccgtcacgacgggctcctgcatcaatacccgcacgatcatgacggttctcagcatcgccaacatcgtcatggacatcatcaccctcatcctcccgatccccgttatcatgagactgaacatgcgtcttgcgcagcgggtgtcagtcgtgctgattttcagctcgggtgtgttcgtctgtgcgattgcgatccagcgcacggtccagatgctgtcggctctggagtcgaaggactacacgtgggatatcaccgagcagttctactggtcgtatatagaggtcaatgcgggaatcctgtgtgcgagcgtgccggcattgaagccctttgcgaagaggcacctcgtgagtatgttcgggtcctcgcagcggtaccggctacagtatcaggagaggaacggtgcgtttggcctggaagcgtcgggtgggcaaccggcagtcgggacggagcaggagaccgatgcgattctgttgagggtgacgccaaaacgagggagttatacgcggttttag

SEQ ID NO: 27687 - DNA, 363 bp, Emericella nidulans
catctcgatcacggcaaggagtacgtcgaccaccacaccgtcttcctttcacgcgcgccaccggatttcaatgaaaagcaaaaaatgcaccactgctcgttcgaggtggaggattttgacacccagctactgggccacgagtacctgctcagcaagaagtggacgcccatctggggcgtaggccggcatatcctcggctcgcagatctttgactactggaaggacccgagcgggtttgcgattgaacattatgctgatggtgacctggtgaacgaggataatgagacagggagggagaagagtgagggtgctgcgtcgatgtatatctgggggccggtgaggccggaggccggggttgcatag

SEQ ID NO: 27688 - DNA, 1161 bp, Emericella nidulans
gctagtggtctgaaggttgctacgcagggctacgagtataagtcttcgggaatcacgcaccagggggagaacatctatgctattattcaagcaccgaggggagatgcgacagaggcgattgtgcttgtcgcagcttggaagactatcgacgggcagttgaatctcaatggcgtcagccttgcgttgactcttgctagatactttaagcgtgagtaccccaagcgaggatggtctctctggtccaaggatatcattttcgtattccccccggatagcaaatctggaacacaggcatgggtcgatgcataccacgatatgcaaccgcctaccgtccagcctttgcctctaaagagtggcgccttacaaggtggcctggcaatcgagtaccccttcgaccaccgcttcgagaacctacacattatatacgacggtgtgaacggccaacttcccaatctggatctctttaacacggccgtctcgatcgctggcgggcaaatgggcattgggacccgtctgcaagagatgtgggaccataacggcagctacgaaaagcgactgcaaactatgttgaggggaatggttaagcagggcctgggatacgctgcaggtgcgcatagcagctttatgccttaccatatcgatgcaatcacgctccagactcagggtaatggctggcaggatgagatggcgctcggtcggaccgtggaaagtctctgtcgcagtctcaataacctgctggaacatctgcaccagagtttcttcttttatctgcttatgcaaactcatcgatttgtcagtatcggcacttatctcccgagtgcgatgctcattgctgggaactttactatcatggccattgcgttgtggctgcggactggatattacaaggactcaactcaagccgccactgtgtcagcgcgtttggttcgggacgagaatataactacaagtgaaagtgaaaaggcacaactcgcaagcaaggatcgaaacgaaacagctccaacgacaggcaatccggcgactaaagctgcagaacgtcaactcgccctcccgcttaccctcattatcggtctgcacctaataggccttatccctctgtatatcttcaacaacatctcccacgatgtcagtgccttgaacttctctgcaccccagaaatag

SEQ ID NO: 27689 - DNA, 954 bp, Emericella nidulans
ggctttgatgaacatgagaccacagtcgagcttccaccatcaggtcctgcttaccggatctataagcggagattttgggggttagcacagcttgtcttgctgaacattattgttagttgggatcccccaacaccacccagcgcatcgtctgccgcaagcaaaacacccctcgtcccagccatcaagcagctcatccggacccccgagttctggcttgtcctgataccctttggcatctacgtcggtttcttcaatagcgtttcgtctctcctaaatcaaatcctttctccttacaacttctccgagacagaagccggcatcgcaggtggcatcctcattatagtcggcctcatctcctcagctatactttcccctctcaccgaccgctacaagcactacctcggcacaatccgtatcctggttcccatcgtcgcagtcgcgtacatcgcgctcatatttgcaccatccagcccggcaggcattggtccatcgtacgccataatggccatcttaggcgcctcctcctttggcctcctccccgtagtgctcgagtatcttgtcgaaattacgtaccctttctcacctgagattggaagcacaatttgctggactgcaggtcagttgctcggcgcggtgtttattctcgtccaggatgcgctcaaggcgggagatgacgcccacccgccactgaatatgcgcagtgcgcttatcttttctgcggtgattgcctgtgtggctgtgccattcccgatctgcattgggctttttgggcgtgatgttagaaggcgccggcttgatttcgatagaggcgtgaacatggatgaggtgcaggcgcatcaagcagagagcgtccgtagcgctgctggggttggagtgactagcggatgtccagcggtagagtccggaaaatcgacgttcggtctcaacttaaagataccgtggggaaagaactaa

SEQ ID NO: 27690 - DNA, 789 bp, Emericella nidulans
gataacgcaaagatcgtgctcatcacaggcgccaacaccggcattggctaccaggtcgtgcgagccctctacagcgccgacaagccctacagcgtcatcgtcgctgcgcgatcgctctccaaggcgcaggatgccatccgtgccatccaggccgagtttcctgcctcgtccaataagctcacgccgctagttatcgatgtcgagtcggacgagtcaattgagaaggcgtacgaggaggtgcaggctgcattcgagaaactggatgcgcttgttaacaatgcaggcgctcagtttgatcccctcatcgccagcaagaaactcaccccccgtgaagcctggaacaagtcatgggacgtcaacgtcaccggcgcccaggtcctgacgctaacattcgtcccgctcttgcttaagagcgccgatccgcgcctcctctttgtcacatccggcacctccatactcagccgcaacgagggcatcgctctccccgtcgaccgctcccccgaggccgggtggcccaagagcaagacggcgatcgacgtggcctcctaccgcagcgcgaagacaggtctgaacatgatgatgcgcgagtgggagcggacgctgaagaatgacggggtgaagtcccgggtttttggcgactgggttgggcgggctcgcgctgaagcgctgaggaagtttggggcgggcgagcccgatgctgcgggaccgttgtttcgcgacgtgattgaggggaggagggatgcagatgccggcaggattgtcaagaaggatggggtgcaggagtggtga

SEQ ID NO: 27691 - DNA, 444 bp, Emericella nidulans
ggctttggaggcgttgtcctccgcttcttcaacctggccatccgggtcctgcaattcctcgattctgcagtcatactaggaatctactcctactttctagccagactcgctcaaaatgaccagcaaatccccacgtggatgaaagccgtcgagggtctctcaggagcagcgaccctctatgccctcttgggatccctgttcacttgctgcctgggcggagtagcattttttgcggctgtggctattctcctcgatgtgtgctttgtcggggccatgatcgccatcgcagtgatgacgcgcgatggtacaaaccagtgctccgggacggtaagcactccacttggcactggtcgcgacaatgaagactccccggctggggtgggttatgagtacgcttgcatgttggagaaggtcgttttcgcagtttcaatcattggagtgtga

SEQ ID NO: 27692 - DNA, 774 bp, Emericella nidulans
tctgacgtcgctgagaccaagcccgaccccgccacaaaggctcaagaggagaccaagcccgaagaaaccaccaccaccaccgagccatcgaagacggaggaggttaaggaggccgctgagtctgctgctgaaacagtgaaggatgcggctacaaagacatccgacagcgtcttctccatgttcggtggcggcccgaaaaaggagaagaaggaggaggaggatgtagatgagccctctggttcctccaaggctcagaaggctgaggatgaagaagaggctcccgagtctcctgatgttcactttgagcccgtcatccgtctcaccgagactgtcgaggtcaagaccaacgaggaactcgaggagcagaccttcaagatgcgcgccaagctgttcagattcgaccgtgacagcaaggagtggaaggagcgtggtaccggcgacgttagattgctcaagcacaaggagaatggcaagactcgcctggtcatgcgccgagacaaaaccctcaaggtctgcgccaatcactacatgtctctggacaatcctccattcagggctggtgctgacaagaacgcagttgtccccgacatgaagttgagccccaacgtcggcagcgaccgcagctgggtttggaacgctgctgccgatgtcagtgagggtgagcctgaggctcagacattggccatccggtttgcaaacagcgagaatgccaaccttttcaaggaggcctttgacaaggccagggaggagaatgagaagcttttcaaacagtag

SEQ ID NO: 27693 - DNA, 558 bp, Emericella nidulans
gcctttagactcgttcttctgcttgttgcgtgcctgctggtctgtaccagctgtgcaaatggtaatgacaaggtcgatgttgacaggacccgtgctaaggaaggtcccgtccttgctccccgtgaggttgttactgtcaccgttacggagaccatttgtggacctgttggacctacctccgctggaggctctcccattacctcggtccctgagacaacccttgcgactgacacttctggcccatcgtctggtccctcagctgtgcagcctcccgccgcatcccaatcttctggagccgatggcgccacatctgcggagcctacttcggctgaagcttcccctagtccctctcaaggacaggccactactacgctccagactagctcggctacctctggcacttccactcctgccgacagctctgaggctcctagtacaacttcagtctccccaaccccgacggatgcgccagctgccaatgccgggtttacccaagggggaatgagcagtgtcattctcgcggtggccctgaccttcgtacgcatctttggggtctag

SEQ ID NO: 27694 - DNA, 921 bp, Emericella nidulans
tcatcggttgaaaacatcctcgttcttggagctggcgaattaggcaccgagatcctcctctcgcttgcgcaacatcctgcactttctaccagaacacacatttccgttcttcttcgtccgtcgtcgatcgcctccccaggccctgctaaagcggcggaactggaaaggctgaaagccaacaacattacccttgtcccagccgacatctcaacctcgtcgcagtcaaccctatcatcactcttcagcgcctatgatacaataatctcagccaccggcttctccgccggccgcgggacacagctgaaactggcaagagccgtcctcgatgcgagggtgccgcgatatataccctggcaatttggagtcgactatgacatcatcggccgcgggtcagcgcaagatctattcgatgagcagcttgctgtgcgtgaccttctacgttcacaggataggacgaaatgggtgattatctcaacggggatgtttacatctttcttgtttgagagggctttcggggttgtggatacggagaagggcgtcgttaccgcattagggagctgggagaatcgagttactgttacgggccctgcggatattgggcgcgttacggcggaaattgctcttgaggagtcatttggggatccggataacattgtctatgttgctggggatacggtgtcgtatgggcggttggccgatattgtagagagtgttatgaggagggctttcgagaggagggtcaggactgtagatgccgcaaagagggacctggcccaggatcccgagaacgggctcttaaagtaccagatcgtgtttggagaggggaggggcgttgcctggaacgcagaggagacgtggaatgctcatcgggggatgcgtcttcagacggcggaagagtgggcgcgagagaacttggtctaa

SEQ ID NO: 27695 - DNA, 792 bp, Emericella nidulans
gattacggaccaagcttcacggaatcctcgttacaatggcgcttcccacttgcattccaggccgtcttcgccattttccttgttctgcaagttatcggtctccctgagacgccgcgctggctggtccagcacgaccgccacgaagatgcccgcgaagtagtcgccgctatcaccgaccgggacgtgaacgacccacaagtggtccggacagtcctcgatatccaggtcggcctggaagaagagcaaaagggcgggccgtttaaattcaaagagctcttcgcgtggggggaggagcaaaatcttcggcggctgctcgtcattatcagcgttgagctggggcagcagttcactggctcgaatatgatcaattactacggccctgtcatgttccagacgacaatgaacatggggcggaacctctccatgatcctcggcggctattgcatcggcttggaactggatggccgtctttgcggtcgtgaaaatcacgccgcttgcgttccaataaccagagctgacggaatagaaaacattggctggcgtacattcgtcatctttgccgtgctcaacgcggcgtttatccccatggtatacttcttctatccggaaacgaaaggcttggaattggaggatatcccgctgctcttcagcaagggcgggttcacgggcggggtgttttcgtccaaaggtgggcggaccgtcacgcctgggcagcatgcaatgcagacgaacgttgaccgcaaggttgagcggatgggaattgagctggagcaggttgaaactgttgcttga

SEQ ID NO: 27696 - DNA, 273 bp, Emericella nidulans
ttcttggagcggacaccaaggtccattgacgctacggtcaaaaacgacgtctctgacggccctgagaagcgcagcagcgatgccagatacaagtatgacagctacgacgctcctgagaagcgcagcagcgatgccagatacaagtatgacagctacgacgctcctgagaagcgcagcagcgatgccagatacaagtatgacagctacgacgcccctgaaaagcgcagcagcgatgccagatacaagtatgatgtctacgacgcaccacagtag

SEQ ID NO: 27697 - DNA, 825 bp, Emericella nidulans
cggacgaggctctcaaaccagccaatcaaggggcaggatctgcgccttgcccgagcaaccgacccgagtctggacccaaacagtggaggcttccatctctcatatgctgtcatcgtccaggacgatcgctctggtcagacctcgctcgtacagcctgaggacagcctgagggccatgagagcccccataacggtgtcgacaacacctggaccggcatttctatccagagtatccgtcggcattcttctcctccttacattccttaccacagcctctgccgcctccgccatccccgcgctctccaccgcgtcgctgcctgaagttacacagcagcaacacgaggatgaatacgatcttcagccacgctcgacaaaacccttcctcctacgggtaatgccgctcggtgcctcgatcaccgtcgggtacatgtccagtgatgagaatggttaccgcaagtaccttcgcgagcagctgcggtatgcagggtggggggtggacatggtgggaagtctggcgaatgggacgatgaaggataatgtacgtcatcctctctctcttgccgcattacgcaaaataaacgcaagaagaaaggaaaagagattgacggtgaggcagcaaaacgaaggccattttggcgacacaatcgaccatatcgccgaggcggcggtcaactctacacggctgcagcccaatgtcatcctaatcaagtattcaaacctcctctccctcacttcttctagtgcttacacgtgcggcagcgccggcacaaatgactgcatccagaatatcgagatcaacgacgccgacactcgtctcgatgcctaa

SEQ ID NO: 27698 - DNA, 579 bp, Emericella nidulans
tttgttactcgctttctgcttcgattgactatgctgacaattctagaaacgttctgcgtcggaggaactagccctaatattcagcaggtgaacggggaatctctactattaacacaactaggtgctcgcattgccgagcttgaacgcgcgctcgccaaggaaagacgtttggtagaaatcttgaaaaatgagcagatcgagaacaccaaactgattggggagtatgaggcggctgtcggtattatggtggagcagattcgcaactactgccacaacaacaatatgcactacctggctcaaaaacgccactacaataatcttctccaggcggagcgtgatgctcatctggaaagccgtttggaccgtgaccactggcatgcgcaaactctgaagtgcgccgagatgattcgcaccgcttatcgcctccgctgtgaggaagacgaacttcccatccgtatcgttgccggcctacagaacgaggtccgcgcctaccgcaatgcccttggcatggagcccgagaagccagaggaagagtacggctgggagattctgaaggatgttccgggaggctctgagtga

SEQ ID NO: 27699 - DNA, 387 bp, Emericella nidulans
cgtgaaacaggttttgtcactaatagacgaatgttactctcctcatcagacgccttcggccgtctaatgttctcctacaaggaaatctccgagctagcaggtttcacagcccgtgtatcatccctgcttgatgtgatggacgacctcctagccggacgcttcgaaaagaaacttgtgtcctccgcctcaacagaagaaaacgctgccgtactctccggccgcggcatcgttgaagaaagcgacgcaatcgaattcaccgatgtccccatcgtttcccccaatggtgacgtccttgttcgcaaactcacatttaccgtccacccaggcgaccacctcctcattgtcggcctaacggctgcggcaaatcctctcttttccgaattctag

SEQ ID NO: 27700 - DNA, 873 bp, Emericella nidulans
ggggcccggccgcaactagccttcgttgcccaagtcgcgacagccacagataaattccgccctgaaacatgctgcgttgtcgggaactactattccctcaaatccgaacacgaaaaggcagttatgtatttccgacgcgctttgaccctagaccgcaatttcctctccgcctggacgctcatgggccacgaatacattgagatgaagaacacccacgccgcaattgaatcctatcgccgtgccgtcgatgtcaaccgcaaggactaccgcgcctggtacggtctcggcggccgcggcgttcgcccctacgaccccaagatgtggcaagctgtaggatcctgctatgcaaagatgggccgcatcgagcagagcatcaaggctctcaagcgtgccctcgtcgcaggctcatactacgccgaagatccctcgcaacacggcgggcgcaaaattctcgacccggaaacactctatcagatcgctactctctatgaacgtctcgaggacgaagaagaagcagccgcttatatggaactcacattgcagcaagaaacaggtggacagccagatgaagtatccgacgtatctgatagcgagatcgaagacgaccagtcaaatacagcttcaacttctggagccaatcagcggcgcgcaaggaggagccccaacgatgacgaagaggaggcataccacggcacaggaccaacggctacaacttcaaaagcgcggctatggcttgcccgatggtctttaaggcatggagacttggaacgtgcggatcagctggcaggggaattgtgccaggatggtgtggaggttgaagaggccaaggcgttaatgagggatgtccgggcgagaagggaagcgggtgcatga

SEQ ID NO: 27701 - DNA, 795 bp, Emericella nidulans
aggctaacttggcttctgactcttctggccgccagtcgggtgctctcccaaaacacagactccgactccgactccgacagcgacagcagcaccaccaccgattccaatgaggaagccatctcgcagtctctagctgaaatcgcgagcgctatcacgaccactgtggatgatgccaccgtcccttcgggggattatattacttactcgactaccgtctaccttaccggaacccatggcacggtgatcggctcaacggccgtgcaggtgacgggcaccccgaacgccaatgccacaacgtccgccaacgcgactattacaagtacttccgacacggtaactgtgctgataggaggccaaacaactatatctggcaattcaacggggaactcgacgcattccgctactccaagcccgtcccagacgccggtcgtcaacacacagccctgcaatggctggcccgagttctgtgaccgaaaatactccaatatcacgcaggttgctgcccacaacagcccgttcgtggcccaaggaaatgtcgctgccaatcaagcgctggacgtgcattaccagttggacgacggggtccgaatgcgtatcaacattaccgaatggctgaggcagcacccctacgatgtagtcacaattctcatcgggaactacgattatgtcgaccctggaaatttcacaacgccgatggagaactcgggcctgatggatttcgtgtttacaccgcccatgattcctatgggtcttgatgactggccgacgctgggcatcgattatcctgtctggtaa

SEQ ID NO: 27702 - DNA, 354 bp, Emericella nidulans
aaagacccgatcggaattcaagaagaggatgacagcgcggaggaacaatttgttcgactctctctaaacgggcatagcaacggtgaccagaaacctgagtctgagtctgaatctgaggaagaagtcgagaaggcagaagacgacgccccgttgctccctgaattccgactggtcaagcgcgatgacccagaggcatactcattcacgacgccccagtactctgcgcataaactacctaaggaagttgttgacgcctcaatgactgggcccggggggatgagcgagtttctaggccagtggcaggacattcttagtcggcaggggcaggagtcggatacggagagtgacaactag

SEQ ID NO: 27703 - DNA, 516 bp, Emericella nidulans
aagctcttcaacacactctcgcttctactcggcgcagctgccacgactgtctttgccggtcgccaggacggcaagaaccccgatacattctacctgaagacttccggagctgagaactctgcacacaacgatctctatgtttacggataccacgcgggcgctggcattaacgatgcggtccctacaccagacattgaaacagcgagcagggcctacctgaacggcaccaaggttctattcgactacaacacaacattcccttggggcttgtcgccctggggcgttaccaactatgcggcatggccattcgttcagatcaacgccggtaccggacaagacggtttctccgtcaacagtaccggcttgcaatggtcgcagcagaagggtttcggtggctggctagtatgcgactggtggcacaacgcaccccaattattctacctctaccggtactacgacgcggaataccccgcctcttgcagtgaggtgaagcttgtgaccgaacccactgcgtga

SEQ ID NO: 27704 - DNA, 456 bp, Emericella nidulans
tcgctctttaaatttgccgcttttgtcctgggaacagctggatctgttgccggtcatggctatgtcaccaagatcgacgttgatggcaccacctacggtggctacctcgtcgatacctattcctacgagcccgaccctccgaagctaatcgcatggtcgaccaccgccactgacaccggctacgtgtctccatcagcttatggtacttctgacattgtatgccatcgtggcgctgagcctggtgcgctctctgctgagactttgcccgggggctcagtcaccctttactggaacacctggccaaccgaccatcacgggccagtgatcacatatctcgccaattgcaatggcgactgtgcttccgttgacaagtcaacccttaaattcttcaagatcgatgcttgcggcctggttgataatagcgccgttccggcacttgggcgactgatgagctga

SEQ ID NO: 27705 - DNA, 360 bp, Emericella nidulans
acatctaatctcggcgccgaatacctagcccgcccaacgaccaaggacggtaagatcgaccctcagacacgcgaactggtcatgggcgctctccgcaactacttcctccccgaatttctcaaccgtatctccagcatcgtcattttcaaccgcctcaccaagaaggaaatccgcaaaattgttgacctccggctcgatgaggtccagcgccgcctcgagcaaaatggccgcaacgtcgtcattgagtgtactgaagaggttaaggactatctcggccagtcaggctactcgccagcttatggtgcccgtccgctaggagcatcatcgagcgcgaggtcctcaaccgcctcgccgtcctaa

SEQ ID NO: 27706 - DNA, 456 bp, Emericella nidulans
cctgcatcttggtcgttcgagatctacgtcgactctgagcaggaagaaatgaccaacctcatgcagcattcgacctgtgttctagacatttctgacgacgaggggaaggacgaaagtcagtcagatcaccgcggaaaggagaatatcccgcccgctgacctgggaatctctctccctcgctcccaacaggagtcccctgcggtagcggtgcctaaatctgacacggtggatgagcctcgctctccattaggcgagctcaatgccgctgacttttatggtgaggactgccatgccttttcgtacgctgttgtgtatgacgatgatgaggatgaggaggcgcctgtcgacaaaaagaacgctagtcggagtaggctctcgagtatgtcgtcgattgagtctgtgcttgaggctagtccagtgaaggcggttgaggaaactatcggcgactcaacctag

SEQ ID NO: 27707 - DNA, 291 bp, Emericella nidulans
caattcggtatatcgagtccactcgctcgcgtcaccgaggaagtatcgagtccggtacacggtagtgcggaaagcgaagtcgttgatgagggcaataaacacggtacgaaagagtctcaggccgaagatttactggaggttgcgcctcaaaaggcttccggaaaggagaacgaggcgcttgaagagcaaccgccggcgaataaggctgacactgaaaggtcgcaaaaacgcgagtctacgcctggctcggataacgaagtcctaggcgagatgaagaatgtcgctatctaa

SEQ ID NO: 27708 - DNA, 456 bp, Emericella nidulans
ccgtcgctccgagccatcgtttttaacctcacccttttggccagcgccgccacgccgagcgcctcagggcctggaaaatacgacggctttgccattgttcgcgagaatggtgaagcaatctacaataccgagacacctaacggcaagacaccctgcgcgaatacaggtggtggccgcatctatcaaattgagggcgactgctggaactccggccgacagttccactgcgaaagtgactttggtgggcaccctgaaacctgcgatgttcgtgatgcggacggaaacaccctgggtgaagctacggcacagacggatactacgtggatcggaatctcgattggcatggatgcaacttgtgtggtggagtttgacagcgacgatgccagtcactgtcctgttgatgatgggaatgggccattgcacgttgtcaaggataaccacggcgatagtctctaa

SEQ ID NO: 27709 - DNA, 2607 bp, Emericella nidulans
tttgatgtcgggtcctatgtccggtttcataacccagcacacgcccaagtgaagtatcctggacttttgcaggttccatcacatcagagttttgggtatgacttgaatatttttcgaattgtctcggccaaaacacaggtcaccgtacagtggcagaacggaagctgtactaccgaaactgccacttctcttctaccgagtgacgcaggcggagacgagctatatcctggagatatggttgccttgaaagacagcgtcagtgttataaactttcatactgcaaacaggcgaatagtgtcacgtctcgctcgtggccgctttaacgagacactgcgtatccaacaacttggtatcgttcacacatttgacagccgagaacggatagcgtccgtccgctggtatcaggatacggatattgagttaatcaatggtggcaattcgcttaaccctagctgttctttaggtagattgggcgatacaatcacggatgtgtctgtctatgaacttaccacatttcccgctctgagcaagaatctgggagattatgttgttgttgccccggcgtctattagtcaatcggttatgtcttcaataccgcacgatatacctaaggtgaatgagccgcgccgcatacactccattgctgctgatgcgtttctcgacccgtcatcgtatctgcagtcaataaaatccgcactcatctcctctgagtggtttaagaatacgactactgtacaagtgccttcactgcgtcggcggtacagcattcaaaatagtgatgcggcacctctaaacgactttttcggcaagatagtcgcgaaggatactagcggcaatatcaccgttcgattcccaggccccagcggctgtcgtgatattcaggttccttttgagagaattctggtagttatcacttccgctgagtcagtcactccaaacgtgcaggatcattcctcgccctatctgaacgaagatactctcgctggtgccaccgccaacgggtgtattgtgaaagatgataaccacggcttccctaactgtaatgagcttgtcacttcacaagagggcgagctcaagattgggacaatagaacgtgggttggtaatgacagtgtcggaaacttgtttggaaagtccaatgcctgacgacggagagattgctgttgatggcacgcctaccccagcacctacaaaatccggcttgccagccattcttagctttcccgtgccgacgctgtctcctccaggcttcaccgtgctagaagacctacctcccgttgaccatcacttcataaaccagaatcacgctggctcgtccacggaacggatgaagcgaattcgcaaagagtttgcgatcctcgaatcttcgttaccgtccggcatcttttacaaagagaaggtgttcctcctgacccgccgcttcattatacatgctcttgaacatcccatccgtggccttgaggatgtcctcgtctggaattacctccctggactaccctctccacgtccacaactattacgcaaagccatccaagaagcgcgagtaatgattgagcatcataaccgcacttcagaatcccaccaggactctaaggcgtctgctttctgctcccgtctcagccaaggcgctactgtgctgttacagaaactcgttagtgctttggaaaggttggaaacagatctcaaagcacgggtggtctcaaagagctttgagcctgctttactgggcaaggaggctgctcgaaaggctgaagtagaaaacgtgcttctatgggacctagacgagctgctctcgtctaccggccgcgcaggctgccaaaacaaggaatgcaaagagcagaagatcaagattgccaaaggcgagctgcgattaggcagctgggtcgacacggagagattccaatcttggttttggagacactggggttgtgtcacccccaaggtcatcgccaatatcaacgaacttgttggcgaaggtgacgacagagacctcgagacgcttgatgggtatgaggatctcccggctgagcttcaggagaaggttgcaagggctttggatcagggtcatgtcgacgatgaggattggaggggtgatcctgagatgaatgtgcgcggcagcagcggcttccgggtgagagcctcagctaaggccaagaaagcaaaagatgcagatgaagaagagaaagatgacgccgctgaagagcagaagactccggcaaagaaaacaaaaaaagcaaagaaggctgaacatgcagacgatgaagagaatgacgacgcaaccaaagagaagaagtcccccagctccaagtctaagaagcgcagccgcgtgcaagttgacgataacaaccacgatgcaggggccgcttcgcccaagaggtccaagaggaccccaacgaggattccgaagcaagttcctgccatttcgtctcaatccgatgacagcgcaaatgagtcccctgagccgaagcgcaggcctgcgaagcgtggtcatcaagccaaagaagcaaagcctgctcccaagcgtggaaagaagaaggctgtcgaagacagcgaagttgagcctgctgctgagaagcccaagcgtggacggaagaaggctgccgcctga

SEQ ID NO: 27710 - DNA, 393 bp, Emericella nidulans
ccgtaccgagcgccagaactcttcgacgtcaagacaggatcgatcatcgacactaaagtggatatttggtctttgggatgcacactctacgcctgcttagtggggaagagcccgttcgaagctcgaagtgaagagacagggggtagtctgagtatgtgcgtactcggcggagactggaggtttcccgatgaaaaatctggagcgaccaagggcaaaggcaaggctagtgagcagcaaaagcaggatagtgccgcttctatcagctctcccgtcaaggaggtcgtgcgtcggtgcttgcaggtcgagcccgccgaccgtcccgatattgacgagttgattcaaatgcttaaagaggttatcagggagctgccggatgacgacgtggtgggttga

SEQ ID NO: 27711 - DNA, 462 bp, Emericella nidulans
tcttccatcaatcgcggagagagtgaccctcactcctcggggtatgagggcgatatcagcgaccaggtctctgagactcgcgccgttgccaatcctgacactgtcgacgagggtagcagcgagaccagcgagaccaatgagcttgagactggaaccatctggataggctgcgatgtgcgcgacgccggtccaggagttcaaagcgatgaggatgccgagtttggaaccattgtgatcggctgttctattcgtgacatgggcttcgagagctaccaggcatatctgaacgcagatgaccaagcaacggttgagcacatcgagaacatcgacgagatagcggacgtggaacactcaagtactgcggccattgacgccaacaacaagaaattgataagctacaagatcccatttggaaaacaagatttgaagagatgggctttcaccttccatttcatttcctaa

SEQ ID NO: 27712 - DNA, 1134 bp, Emericella nidulans
gcctcgacataccctgaccagtccgaggaaactcggagctgggctggggattttgacccattgggtgaagaaagtgaacggaaggttctcttctcagctttcgattcattcatgcaatatcgaagaagcgcacacttgaacaccacacaccggcggcgccaggcgttctacgccctcccaacgaagcactggcagatgcttgcagaaccgcctttctcactcctggataactttaacaaagttgacgatgccattgacgcgaacgccgatatcgcagatgccattatcgggacgggcctcaaatcatttggtcttcccgagcaacccgacccatcgaatccgttgcagaattggcgtggagttgcgaattctgctgatatcaacaaggctcactctacgatcaggcagttttatcgagactggagtgcagagggccaagctgagcgggaggcatgctatattcctgtattaagggatttggacctcgaattccccgacaaactggaacgggaggagtttgttaaggttcttgtccccggagctggactggggagattggtgtttgagatctgccgggccgggtttgccgctgaagagcagcagctacgcaaagtcatgatccccgatgtacatcctgcgactgcgatgctggaggcgcaagctagcggtacaccgtttgggacgatgagcatgtccgctgctgattttgtcgtcctgtacagcagtccgtctcagacggatgcctttgacgccgttgcaactgtttttttcatcgacaccgcccctaaccttattcggtacattgaggcggtcaggaactgcctgaagtcaaacgggatttggatcaacgtcggaccactgctctggcactttgaagacggccaccagcgcacccgcagcggagatgggagctccagccgcgatggcggtgatagccagggcatcggagagccagggaacgtcgaattgaccgaggaagaagtttttcttctcatcgaacgcatggggtttaagattgagaaagtcgaggccgtggaggagcgggtagaatgcggctacatccaggaccccaacagcatgctccgctccttataccggccatcacattggattgcacggaaactcaagaattga

SEQ ID NO: 27713 - DNA, 267 bp, Emericella nidulans
aggggaagcccgatgggtgatggtaacctggaggagttgattgacgatgaccacgccattgttacgagcgctaccggcccagaatactacgtggctatcatgacttttgtcgacaaggacctcctggagcctggagctagcatccttctgcatcacaagacagtctcggatgctggtgtgctgacggaagagtcccgatccgctggtcttggtgatgaaactcgacaaggcgccaaccgagtcatatgccgaaactgggggtcttga

SEQ ID NO: 27714 - DNA, 306 bp, Emericella nidulans
cacctcatccctgtcggacttttggccctgacggcgcagatgggcctggttctctgtcgaccgatgggagatggcgcctcggagtctgggaaagtcaccccggaatggacgttcagcatgcccaatacctatgagcactctgccgacctgcgcagagaccgcaatcacgatgcggcgatgatggggcccagcacccacgaaaacgaaaaagtatccgactggtcacttgagaccggcatggtggatacagctcccactcaaccgaataccgacgctgcaaggatgatctccccgacggaaacatga

SEQ ID NO: 27715 - DNA, 2073 bp, Emericella nidulans
acgttactcaaggttgtgtctagtgatgcccttgctttggagaccgttccagaacaaaaacgacgcactatctggaaaatcgctggcgatgttcgagaacaaggtgcggagttattgcactctacttgggaagcgataggttgggaaacggctgaagatgagagggaacgctacggattgaacagacttggcggttatcaggtccaatacgtgccgggccttgtagcccccattattgagctatgccttagtgtccatgagggcctgcgccttgtggctgttgatattctgcgaaccatgatcatcagcgagtgggatctcaatcatgatctctcggttattgaaactgagataatttcaagtctggataatcttttcaagacgaaggacatgagcgagggtgtgattcagaagctctttattggggagctgcttgatcgttttgttggttgcgatgcgtttgatgaagaacttgccacggcagtcaaggctcttatcgcgaccgtggatgagcttctggatttattcgtggcgtcgcaaggcggttctatggctgagagtctgcatgttcttcgactgatggagtacatgaaagacatgggccgagaggatatcttcatccgctacgtccacgaactcgcccaaagccaggcttcagctggcaactacaccgaggccggtcttgcgctacaatttcatgccgacttagaacttgcgctgcattacgaagttactgtcatggattttgctaagctttcgcgagcccagagctccatggcaaaaatccatgagtccatcgccaaggaagacaagcagttcccccgctacttccgtgttttgtacaaggggcttggtttcccagcaacattacgtgacaaggaatatatcgttgaatgtgccccgacggaacgcatggctacgcttattgatcgtatgcagaaggagcaccctgctgctcaggttatgtcgtccggcgaagtcaacgattacgaaggtcaatacctttatatcagccctgtaagcgtgcaccgggatatgagccaccctgtttaccagcggtcaaaagttccaccgtccgttcgcgaccatcttctgatatcagagcctacgcgattcagttccacactgagaagacatattggtgatgcagatgttgaagagcaatgggtggagaaggtcatctacacaacctctgaacccttcccgaatattctccgcaggagcgaaataattagcactgaagagattgcgttgacgcccctacaaacagccctggaacggacgtggcgcaagacgcaagactgtgtcgcgcactaccgtcagtttttgactgacgagtctgaggatggcgaggaagaggaagaggaagaggaagtggaagcgaacacgcctcaaccgattgatccgctaaaaaacgccctcgctgtggctctcattgaccatgccttagcgatcaagcacgccctcgcactgtactcgcgtccagcgcatcaagccactcaggctgagttaacacgccgtttcgaagaagttttcgcacccgaactttcttcccttcgtcctacagagagcatgcccccgttgctgtaccaaagcaagtccccgatctcatcggaaagccgtcggaaacacacatcctccctctcaataagcaccagtgtcaacgaggacgacaccaacaagtcacagaaacggcaacgatctaaaagtgcgtcacgaagtgccgccgacaactctgcggagaacgttagccgcagcacatctcggcacaatggcaccatggggaatccatcaacaccatcagtcactagccccgcgtcagttaccagtcccaagggtggttggtcaacgataccttcagtcaccgagcatccgcgaccagtaactcggagcagtctgaattccgttcggagtcctgaaatccggagccctggcgcccataccaatagctcctcaaacacgggaggaggcgtacgagattccgtcatgaagcgcttcagcttgctcaagggagtcggacgaaaagccagccgccttgatttcaagaacgaacaaaccgtctacgaggagtga

SEQ ID NO: 27716 - DNA, 288 bp, Emericella nidulans
gaaaagttggacctcaagatggaggagctgaactacgctatcctggagcttaaggagatgattaaaggttatccagatcctgagatcgataaatactttgaggaacccgatcttggagaagaggactatagtactgatgagaaagaggcttacttcgaggaaagatcaaatgagtactccacactccagctatcaagagaaaatgcggagtatgattcagactttgaggattcaacaagtgaggatgaggacttctcagttcctctcctcgatctcttctctacctaa

SEQ ID NO: 27717 - DNA, 333 bp, Emericella nidulans
tgtgttgcccatataggcaccttcaaagtccagaccgtccagcaagccattgacgcgatcgatctccctagagagatcctcaatgttcattgcgagactgctgacctcgtcgaacttacgtcgtcgattcgcgtctgcaatcatctcggaaacgaagaacttttgctcctccagtacgatcagtcgttcccgcagggccttttcctccgcttccagcgcggacacagcgctactgcgttcgctggctatgctgctattgctaatgctggcagcgactttaccgctcttgactgcagccagagcagagttttgtcggcgatgaccttccactga

SEQ ID NO: 27718 - DNA, 537 bp, Emericella nidulans
ggaattatcggtcctcttgtagacggtgctactaaaacactacgggcagccggagttgcagaggatcacattgaaattcacactgttccaggaagctacgaactgccatttgctgtccagcgtctctactctgcctcgcaactacaagccgccaacgcggggtcatcgggggaaggcatcagcgcaacagatctactctcgtcttctacggcggatgtgagcaagacgccatcgacagcctcaagcgctgcttcgaaaccctacgacgcgatcattgcgattggggttctcatcaagggcgagacgatgcacttcgagtacattgcagacgcggtcacccatggcttgatgcgtgttcagctagataccggtgttcctgtcattttcggcgtgctcactcttttgactgaagagcaaggtcttgagagagctggattgggttctaagggaatgcacaatcacggtgaagactggggaaatgcggccgttgaacttggcgttaggagaagaggctgggcaaagggcgaggttgcttga

SEQ ID NO: 27719 - DNA, 303 bp, Emericella nidulans
aaagctgtcgtcggagaagaagccctttcctccgaagacaagctctctctcgagttcctggaaaagttcgaacgtaccttcatcaaccagtccgcatacgagtctcgctccatcttcgaatccctcgacatcgcctggaacctcctccgcatctatcctccccaccttctcaatcgtatccccaagcgtgttctcgacgagttttatgctcgctcaggccgcaaaatccctaataaggatacccgggacaactcggtccctgaacagggacagtctcaaactgcggatttgatcgagacttag

SEQ ID NO: 27720 - DNA, 825 bp, Emericella nidulans
gatgcaagcattgggacttacctttgcacatacgatttcacggacacggccctggaaaccttggtcaaggttctttatggagagctgacgcctacggggtcattgccgggttctttcaatcgcagtcagaagctccaccaggcaagacaacattggcttgtggaaaactggaacgaggagagagattccgatgcattggacgcgcttctgaagacgatgggtccggaactctctggtgtgacgcccagtagctttcttctgcggagagacgacattgacgaggctcactttgttgtccgaaacagcaccactcgggccctctacggcttctgttcaacctactacttccgggccactggcacgggggtcatcggatcattgattgtcgacccatcgcggcgcaggctctcgattgggaattccctccacaaccgcgctatccgaacgcttatgcaacgaaaagggatgaagcggtttcaactggggtcccgtcttccagggatttacctgggcatacccgccgctaaccctgtcgaaagaaagaaacggcggcagtggttcgcaaatctgggctggaacaccgccctctcccgccctgtctgcaatgtcgctctccgcaacttgcaaacttggtctccgcctgagggcctagtcaacagcctacagagcgcagacgcggtttacgatcttgtccacggatgggactatgctgactcgatcattgaccatgtcaagaccaactccagacaaggagggttgatcctattaggaatcaagcagatacggagacagggcgctgatgcagttgttatagattgtctatga

SEQ ID NO: 27721 - DNA, 951 bp, Emericella nidulans
gcctcctgggacgtcgctaatatgtgccagccattaaacgtgccgacaattctggctgcctcgagtttcgttggactaggtgttatcacttcggacccctatgttggcgataatgcccagtggtacctcaatcaaaacaatttcctacgcagcatcaagaacttcaagattgatatccgactcacagacccatccgcgtatgtttgtggaattcactggcaggttgcacagggcacatccctggagaacattgaattttacatgctttacaattcagatgtccctgagaacactcagcaaggaatatacatggaaaatggatctggaggttttctggctgatctcacctttgtgggtgcttattttggcaaccaacagtttacgactagccagctcgtgttcgttaactgtaaaactgcattgcaagttcactgggactgggcctggacaatgcaagattatgttattgagtcatgtacaagcggtctgactattgttggtggggccggtggccccttgagtacagggcaaggcgttgggtctctgattcttgcagatgcaattattgccaataccccaaatggcatagtgacatcactgcatgctgagaactctacctccctcctccttcacaacgtcgggttcttcaacgtcaagacagcagttattgacaacgtgatgaacaaggtcctccttgccggaggagacgaagtgcttaaagactcgtggggcttcggcactgttactgatgcctctggggttagcacctttgtcaacggcgctgatatccctgtcatgagcagaacggcaataatgactggaactcaggcctatgtcaagcctaactggtttactcgccgcagaccacagtacgaagaccttgcgactgaggatattgtcaatgtgaagctgtttggcgtcaagggtgatggagtcacgacgatactgtga

SEQ ID NO: 27722 - DNA, 1512 bp, Emericella nidulans
gaggtccggcgacgggtgtggtggacgctcttcatctttgtctcgggcgtccagttgatcctgggccgtccggcagtctcactcgtcggggtaaatgttcggcttccagccaatgtagacgaccacgatctggcagtagacatggaagagctccctgagagctcgacggggccaactatcacgtcctgtctgattgcacaggtcaaacttgcgaagatcgcgaatgctatccaggttgagctgctgacccatcaccttcccacccctgccaaagcccaggacttggaacagcgtatttcctcctggcacaatgaccttcccgcccatttcaacacagaggtctacctggagccgaagttcgatatcccacggcgagtcgtattatggaggtcgtatcatctgagaatcgtcataaacaggccttttctcttccaaaacataacctcgaagtccgaactcaacacatcttctggtccgattgcgtcttgtctcgccgctgcagatatgtgtgtgacgtcgatttgtggatttcttgagtcgacggataaccggcagcgaggactcacctgcgtgccgtcgattgcctggggagtcttgggtcttctcacgacatggcccttcgcgcgagagctgtacttcaaaaggtcctcgagccctaaatgtcctcttctgttcgatcctcgtcttcctgaccctaagcttcccctcgaacccattcgcgccgagcccaagcatctttacgctcacgcgctcgcggataaccacgtcgctggagacggtattctcgcgactagcgcgcttgaggcctgggggcttgataatccgaacacttacgccttattttattacccgcgtaacgcaatgattccgcatctactgcatatggccgttgttggaattgcgacttctacatcgtttgcggggagagaggcgggcagatggcggaacaagtttacgattgcgggattgatcctcgcagcgctggacacttatgtcgtgttcatgtatgaccctgtcaaatcggggtccgacgctgtacgggatgggattgaggtcccgactgcgctgttccagaggatggctgtattgaggccgctggttttggcctgcttcgatgttgtcctcgcgggctttatctacgtgtctgctacgaataggtggttctttacgccgcccaaccaggcagacgaggtcgataaaatcgtggcggcgtcgttggcgtctctgaccggtgcgagctcgaagttgcacgctgtgagtgtgaccaggcatgcggtcgtgcgggaccgggtgttgaaggaccgggatgatgcgtactggcagacggtggtcgctatggatgggcaaggcagttcgggggctccgttggacgtttgggaggaggaagaggtcgtgcgggcaatgtcgcgggcgatggccgggcaaggaggagtcgaccttgctaagctgggagtcagtgcggcggagtacgtgaacggggtaacagcggggttggaacaggaaagcttatag

SEQ ID NO: 27723 - DNA, 450 bp, Emericella nidulans
catcggtgccatggagccacgactgatatcacagcagacgccactcgggcggtcaccaagctcaaagcgacaataacacagcgattcgtgattgatgggatcgaagtagacgcggaagccgactgccgcttctgcttcttcttcgagaaggcagatgtcgacggtaagggcccccggtggggggctcgattcgtgcgacactggtacgagaaggacaagctgctcccggttgtgccaggacgatttcccaaaatagacgtggacaagttgaattcctatcccgaggggtacaagtgtcttgtgtactgccaggagctcacaatgggggtcaaagttctccaggacatgccgggccaccggaggcatgcgggaacattgagcggggagaagcatgacctactgtatcgcctagcaaaggactggcttgatgggaaggaaatcgatgtctag

SEQ ID NO: 27724 - DNA, 525 bp, Emericella nidulans
gcagttcgtggagtgttcgaagagctcactgagattccgattgcggtcgaactggcctcggactttttggacagacaggcgccggtcttccgcgacgacacatgcgtgttcgtctctcaatctggagagactgcggactcgcttatggctctccgttactgtcttgaacgtggagctttaaccgttggtattgtcaacgttgtgggatcttccatttcccttctcacacattgtggtgtccatatcaacgctgggcctgaaattggtgttgcttcgaccaaggcatacacttctcagttcgttgctatggtaatgttcgctctctcgctcagcgaagaccgagcttcaaagcagaagagacgtgaggaaatcatggaggggctctctaaaatatccgatcaatttagagaaattctgaaactcaacgagcccatcaagcagatgtgcgagcgctttttcaaaaatcagaagagcttgcttttgctgggcaggggtggccaattccctactgcacttgaaggttag

SEQ ID NO: 27725 - DNA, 1281 bp, Emericella nidulans
ttgactgaccaggcagactggcataaactctatacgaaactccacgagtctaccaacagccatccaggcattgtcattacctttggaagccagcgctttatacctcaatggttcctccgcaagctggggccaaggctggcgcatgttctcgacttagacgtcggttcgggccactggcccgcgccgctgtatacgctccaggacagcggccaagacgagtctattgccgtcgtcggaatggcctgcaactttccaggcggcagtgacctggacgagttttgggataccgtgtgcgcagcaaagtctcagtgcaccgaggtgccaccagagcgcgtggacttcgactacgaagcatggcgcgagaatgatacgcagcgaaagtggtttggcaacttcattcgtgagtacgacaccttcgaccacaaattcttccagaaaagcccccgggaaatgatatcgacagacccgcaacatctaatcatgcttcaggtagcctatcaggcggtgcagctgtctggctacttcaatcggccggggcgtagcaagcatgtcggctgctacgtgggaattggggtgactgactacgagaataacgttgcctgtcacccgccaacagcgtatacggctacaggaaatctaaacttgctcttcgtctgctctagcgatccaccttgcgtgcaagcaatcttgagcggcgagtgcgatgcctctcttgccgggggtgtcaacgtcattactagccccgaatggtaccaaaatctggatggcgcgtctttcctcagtccgacgggccagtgtaagccatttgatgcagctgcagatggttactgccgtggagaaggcgctggtgctgtattcctgaagaggctatccagcgctgtcgaggatggtgaccagattgtgggcgttattagggcgacctctgttaatcaaaatgagaactgttcagcaatcacggctccaagcgttcgatccctagccaatgttttcaatggcgtcattcgcaaggcgcgagttgatcctaagcaaatctctgttgtggaggcccatggcaccgggacgcaagtcggggaccgcgcagagtatgacagtatccgcacggtgctgggtgggccaggacgagcctatcctctgtctctgggctctgtcaaaggccttatcggccatcttgaatgtgcttcgggcatcgccgctcttattaaagtgttgttgatggtccaaaacggcataatcccgccccaaccgggctccagcaagatcaaccctaagctcgaggcctaa

SEQ ID NO: 27726 - DNA, 1074 bp, Emericella nidulans
cgtctcgtcaaaaataagattgaatatggcggggccggcagcgtcaccctcattcccgaagagcctgaggacatgaacctcgactttgacccgcagaattctcaactacatgttagcgggcaaattgtgaacgagacgccgcatacgaagattgggcagcatcatacccttgacctagagcttaatcgacagttcactcttgagaaggggaccgggcaggatggtgaggggagcgggtgggatagtgtcgcggttgaagccctgaaggatgcggttgatgagggtggaaatcggagggcagaggctgtggccgttgtgatgcaagagggactggcacatatatgtttcattggacaattccggacggtgttgaagcaaaaggttgagatatcagtgccgaggaaaagggctggggggagtgatcacgataagacaatgacaaaattctaccaaactacccttgacacgcttctgcgccacatggaattcaacctcagctcaacctcaatgacaagcaatgaccccgtccggccagtcctcctcgcctcgccgggcttcactgcgacggccttccaaaaacacatccaatccgtcgccaatacaactactcccgcgctcaaacgcctcctcccgtctattgtcgttgtccattccgcctccggctatctccactccctaaccgaagtactgcaatcccccaccgtcaaagctcttcttagcgatacgaaacacgcgcgagaaactaaactcatggacgacttctacgagcaactgcgcaaggagacgaacaaggctacgtacgggccgcgcgaggttgaaaacgccgttgaacagggtgctgtggggcgcggcgggggtattctcatcatttcaaacaggctgttccggtcccaagatatagcagagcggaacgcctgggttgcgcttgtggaccgcgtgagggatgtcgaagggggcgaagtgcgtgtgttgagttctgagcatgagagcgggaaaaggctggatgggctgggcggcattgcagcgattttgacgtttcctatttcagatgatttggaggaagatagcgaatga

SEQ ID NO: 27727 - DNA, 378 bp, Emericella nidulans
ctcagcaagggccttcccccgaacttgtgtgccgatgacccctcgttgtcgttcgccttgaaaggcgtcgatatcaacatggcgtcttacatgtctgagcttgggtacctcaataatccagtcagcaactttgtgcaatcagcgaacgtgaataaccaggttgtcaactcgctggccttgattggggcacggtatgctgcggatgcagtggaggtgttctcgctcatggcggctagccatatatacgcgctctgccaggccgtggatctccgggagatccataggacttttgagacgattgcccgaaagcatgttgtcgaatatacatcggaccttttcggtcagtccctcactgacaacgatataaacacaaaatag

SEQ ID NO: 27728 - DNA, 777 bp, Emericella nidulans
cttatctttggtagtgacatgatcacaagtcgccaaagcgtcacccgactcgagtataagactgtcgatatagcgtggcatgctccgccgagaaacggtgacctttgcgcttacttttggtgtaacgctttcggtgaggccagctttaagattcgatcatctcccatcatgtatacaggacagttttcttggaaatactttccaatgacaacccaagaccttttccgcaaactttccaccggccagcacccagagatcctctggataggctgttctgactctcgatgtcccgagacgactctgctaggcctcaagccaggtgatgtgtttgtccaccgaaacatcgccaacatcttgcagccctcggacctcagttccaccgctgttatagagttcgctgttcgccatctgggggtcaagcatgttgttgtctgcggacacacaaaatgtggaggcatctctgccgtgatggcaaacaagaagcttggtattcttgattcatggctttcgcctctgcggaagctgcgtgacgataattcggactgcttgaagtcattaccaacggacgaggcgctcctcaaactagttgaactgaatgtccttgccggggtgaagacggtgaagcagaagagtgttgtggttgaggcgatgcagaaagggctgaaggttcatggactcgtgtacgatgtcgggagcggtgttttgcaggaattggataccagtgcttctgacaagaccgtgaagaaacggttgacattgtttaagaaggacttttag

SEQ ID NO: 27729 - DNA, 543 bp, Emericella nidulans
gcttgtggactgatctgcgcacccatcacaccggagatcgccgaacgcctccaacttccccagatggtcctcgaaaacacagaccctaaaggaaccgcctacacagtttcgattgactcggctgacccgtccatcacaaccggtatctctgcgcacgaccgcgccctagcatgtcgaacccttgcctccccctctgcccgcccccaagacttccgccgaccaggccacatcatccccctgcaggccaaagctggcggcgtcaggcaacggaagggccacactgaggctgcggttgagttttgccggctggcaggaaaggcaccagcaggtgttattgcggagcttgttgaggatggcgaggtcgttgagggcgttgcggagatcagggggaataatggaatgatgaggcgcgatggatgtttgaagtttgggaagaaatgggggctgaaggtgtgtactattgaggatttggttgagtatgttgagaggttggaggggccgttgcatggcgagactggtgatgctgtcaatgggaaacactga

SEQ ID NO: 27730 - DNA, 441 bp, Emericella nidulans
ctcaacgcgggttccacatttggtcggattgcgcccaacttcctggctgaccacacgggacccttgaacatgctcatccccgcagtttcaatcaccgccatcctctctttcgtctggattggtgttcacactgtccccggtatcattgtactgtccgttctctacggaatattctccggtggctttgtctcccttccccctgtagtcatggcatctattaccaaggacatgcgcgaactcggcacccgcatgggaatggtcttcgccatcacttctgttggactgttaattgggacacccatcggcggtgctatcatgagtaatacgcataagtatttgggtgtccagctctttacgggctgcgccattaccgttgctgctgctattttcctgggcgtcagattggctcgtacgggagtaaatcttgccgttagggcttaa

SEQ ID NO: 27731 - DNA, 1164 bp, Emericella nidulans
ttcatcggcgcaaaggtttacgatgggaaactacctctccccgagtccaaccagtccatcaccgacttccttgtgcattttgttgacctagcatatgagcatgcatacccacacaaaaaggcctggactatttactggtcgttcctcatcttcgagggctttgcatacctctacttgcccggagtctaccgcgtcggcaaaccgcttcctcatctgaatggacaccagctcccatactactgctctgctgcctggagttggttcgtcacaattggcctggccctgggcctgcacttcactggtatcttccgtcttgacgcactcatcaccgaattcggcccgatcatgtctgtcgcgattgcgtcggggtggatggtttcggtcatcgcatacgtctctgcgctggcgagaggtgctcagcacaggatgactggaaaccatatctatgactttttcatgggcgctgaactcaacccgagactcttcaagtggatcgatatgaagatgttttttgaggtgcgaatcccctggttcatattgtttcttctgacgctcgcgacggcgttgaagcagtatgaacagctgggggatatgtactacgagaaatggggtttcatgctcatcttctggaatctcgccggcgttcccatgagctattgccactgcaccctatacctagcctaccacgatccctcaacctaccggtggaacccggtaactctgatcatctgggcgggactgtacctctttttctactggatctgggacacctgcaacagccagaagaatgtcttccgcgctgaagagcgcggcgcaagtgttgaccgcaagtccttcccgcagctcccttggcgcagtgtcaaaaacccgaagaccatcaagacggctgatggggggttgatcctttgcgatgggtggtatggtatcgcccgcaaaatgcactatacctgcgactggttcttcgcgatatcgtggggcctgattacaggcttcgactcgccgtttccgtggttctactctatcttctttacgatcatgatcatccaccgcgcgaggagggatatccggcgctgtcgcgagagatatggcgaggcttggaaggagtatgagaagcaggttccgtggctgtttattccgataaccatccttccaacatctaattag

SEQ ID NO: 27732 - DNA, 1314 bp, Emericella nidulans
tttagaaacgccattcgagcgcgagtctctctgctacccggccgcctacccgctgccctagcctgccggtggaactcgtctgtgccagctgcgcaaaatctcaggatcaacggcgaccgtctatgcgctccatccccgggaggggtgacccgattatgtgcagacgagaatgacaagtttgcccgggactggttccgagaccaagtgctgcagctgggtgcagagtacaaggtcaatgcgacgggcagtcaattcgcagtattcggcggcgaggactataccgtgccaccgattgccatggggagccatcttgacacagtagccacaggcgggaagttcgatgggccactcggggttctatcgggtctggaagttatacgcagcttcaaagaacagggcatcaagacacgtgcccccctcgccctgattaactggaccaatgaagaaggtgcacgcttcttccccccactgggctcgtcgaccgtttacgcagggcagacgggtgtagagcaggcgcatgcgtccctctccaatgatggttctggcatcaccatgggagacgggttaaggaagatcggctacgtcggcgacggtccaaacacattcgaggaatttcccatttcggcccattttgaagtccacgttgagcaggcaacggacttggaaaaggccggcaagccggtcggctgggttgaagggtggcatgggataacctactatgaggtgaccttttccggcgaggacggccatgccaatacctacccaatgtacggacggcgcgatgcattgactggcgcagcaaaactcattacgcagctcgaaacactggcatatacaaaaaacggatataccacggtaaccaacatccaaagcgggccttggggtgcatgcaacatccagtcgaagacgaaggttgtcttctgtcttatgcacagagaaggagaaggactggaggacatgggcgctgatattgtccggtcaatcaagggcattgcctctctacatggactggagtataagttaagtcgaccagtccatcttttgccgggcaacttctggccagaggccgttgactgtgttcgtcgagcttgcggtgataggggtatcggatcacgcacgggcactggccacgattcgactatgacccggctcaaatgtccaacagcgatgatcttcgtgcgaggaaaggatggaatcagccattgcgcgaaagaatggagtgacaaggaggattgtgaagaaggcgctctggtcctcggcaaggcagtgctcaactttgatgcatatctagaggaccacgcagcaaagctataa

SEQ ID NO: 27733 - DNA, 1458 bp, Emericella nidulans
agggacccgacagtagatatggagcaacgtaatacatcaccgcaccaggcttccagtcttcaggctgaggccccgaggaggacccagaagtccgtccgagttgcctttggccctgacttggaaacgcatatcccacctcgccaaagatcccctgcaccgatttcaaatcaccatcgctcatttaccactgtcgaacaccacaagcctccaccggctaggccgacgagctcttctggcgagaacacaacgcctaccgagggcaattcgcggtttacttcagaccaagattccagtagtagtgcacggccaacggcggctctgaagagggccaagagtgactatggaccccgcggaggtttcgataagcccgtggtcgtcgataacgaggatgaggaggactttgcgatgaggcatgggtggcaggaggaatacacgtcgagcgagtacctcaaggtgcttcattcgacaaatccaaccgctaaactcgaatgctgggtcgacccgacatccaccaccggcggcggcaacaacaagctgatggagcaaattggaaaaaaactgcaagagcaatacgagacacttagtcttaggacgcggtacaagcaatacctcgacccttctgttgacgaaaccaagaagttttgtgtatccgtccgccgaaacgccaaagacgaaagagttctcttccactacaatggtcacggtgtcccgttgcccactcagtccggagagatatgggttttcaacaaaaattacacacagtacatccctgtgtccttgtacgacctacaacaatggcttgcggggcccagtctttttgtgttcgatgtttctcatgcagggaacatagtccaaaacttccacacctttgttgagaaacacgagaaagaaaacctcgagcagaaaaggcttgatccgaatgctatcgttcagaactatggagactgcatcatccttgcggcgtgccaaaagaatgaatcccttccgacgaatccagatctcccggcggatttgtttacatgctgcctgaccacaccgatcgagattgcgttgcgctatttcattctccaaaacccacttcaatccaatatccgaatcgacgactttcgggttcccggtcgcttacaggaccgcagaagtcctctcggagagttgaactggatcttcacggccatcaccgacacgattgcgtggaaaactctaccacgagccctcttcaagaaacttttccggcaagaccttatggtggcggcattgttcaggaactttctgctgagcgagcgcatcatgcgcacatacaaatgccaaccaatctcatcaccagaactcccagagacccataatcaccccctctggaaaagctgggacctggcggttgaaatggttcttgctcagctgcctgcccttatcgatcatgaggaaggtcgcagacaatacgagtatcaacattccacatga

SEQ ID NO: 27734 - DNA, 678 bp, Emericella nidulans
gtcggtttcgatatgcacgggttgacgcctgccccagtcacgccgttcactcctaccggtgagatcgactacgacgctatccaacggctgggaagctggctcagtagacggagcacccaggatcgctaccgccgtgtctacgaggtcagcaatctcccattgattctcttccagtatccagacaacaccaaggccacatatagcttgcagacgatgctcgatatcgctgcgcaaccgggtgtctttgcaatgaaaaacggtgttcgaaatatgcggcgctgggatacagaaatccctgtaatccgacgcgagcggcctgacctgcagattctgagctgccacgatgagtatctgctacatactgcctttgatgttgacgggtttttggttggatatgggaatattgcgccggagccgctgattgagttgattgaggcgggcaaagccaaagactacagaagggccagggctatccacgaccggcttctcccggtgaccaagagcgtctatcaccgtggatcgcacatggaggggactgttgctttgaaacacgcattggtggcccgagggattctctcacacgccaccgttcgatctccgcttcgtccgctggaggctggtgctgagcaggagatccatgctgcaatcggcactgctgcattaggaaaggttgcatag

SEQ ID NO: 27735 - DNA, 864 bp, Emericella nidulans
gccccctccttcgtgagcatcgacacaaccccagacttcgatatgacaccgacttcctcaaagtccgccgacagcggtaaacggaccctcctcctcgcaccaccctcaatcgccacccaagaagataaactccgcactctcttcacaacgtacgatcgcagcacaaccgatcttcagatgcttgaccgcgtctcagcgggctttgtctctctcccagcgaacacatacgatcttgttctcgttcttacaggcacagatggcacgcggcgttcggaggcgctgcaactgctcaagcgagaggtctatgcggctgttgtcccggccatgaagggcggtgccaagttacagacggaggacaacttcttcggggaagccgaggatcgggaggcggttcttgcggggctcgtgaagaaagagaccggatttgagaagatggatgttggaaacggggctgcgccgcctccaattatcagctccgatgataacgatctcaatgacgatgagctgatcgatgaggataccctcttgtcggcggacgacctcaagaggccaattgttccacaatgtcagcccaaggccggaaagcgacgtcgcgcctgcaaggactgcacttgcggtctcgccgcccagattgaagccgaagatagggagcgccgcgaggctgcggacaagagtctcaatgtcatgaagctcgagtcagacgatctgaacgaactagacttcacagtgcaagggaagaccgggtcttgcggtaactgcgccctcggcgacgccttcagatgtgacggatgccccttcattggtctttcagccttcaagccggggcaggaggtccacatcttgaatgacgttgcccacctttaa

SEQ ID NO: 27736 - DNA, 270 bp, Emericella nidulans
aactccattgcccgtggacagaagatccccatcttctccgcctccggtctcccacacaatgagattgctgctcagatttgtcgtcaggctggcctggtcaagcggccgactaaggatgtccacgacggtcacgaagataacttctccattgtcttcgctgccatgggtgttaacatggaaactagccgttttttcacacgcgatttcgaggagaacggcagtatggaacgagtaaccctcttcctgaacttggcgaatgacccaacgtaa

SEQ ID NO: 27737 - DNA, 1146 bp, Emericella nidulans
ctgcacaagaagcgcaccggcagggccctgttgatcaaccgcgaggtggttgagaatgagtctatgtacgaggagatcgacgacacttaccgtgccaagatgctccagtatatgcgcgtccataatgcgcagttgaaccacgactttgataatacgcttctcgccgggctgcctacaacgtcgcagggactgcagatgccgagttctttgcatacggggccttcttacagtctggggcagtcttcacactcgattctgcagatgcccagtgcttctcacagtccgctgcccagcccttcacattcatcccacgggtcgacttcgcaaagcccgcaaatccccagcgcttcacaaaatccgcgcgtacagaaccggcctatctccagccgtcgaaacagccaccagcgcgcatccagcgtcgcgcccactgggccgatccatggcgcccgcaagctgaccatcgacctgtcccagctgcgcaataaccttcccggaccaagcaccgaaccgagaagggcgagctccaacgggttcccgaccccgggagcgaacttctcgccgacctacttgagtcctggccaggcccactctcaagcccaggtgccatcctaccttgcagcagaacccagctccgctattcgcccacagttgcagcagcaacaacagcggcaacaacagcaacagcaacagcagcagcagcagttgctgcagacctggcaaaggttctatccaaccagtgcttcgtcactgtccgaccccagctcctctgctgagcttctgcctacaccgcgaagcatgtcgccacacactcctgccccttcccaagcttctcacccgcgcatgagctttggagcgggcatcggcgaactcaacatgaatgaagcggaaccattcaagcacactctgttcgaactacagggttttgatccagatctccagcttggtctagagatgtcgggacaagggcctgaaagcgcggaccaggatttccttgattttagccagtttgcctctacgcttgaccagaaccatcatcaggctatgtttccgtcccattggcagatgcccgttggctctggcgatatgccggcagattctggcttttctggcggcttggatatgaaagagtacatcactaacttgtga

SEQ ID NO: 27738 - DNA, 372 bp, Emericella nidulans
tctagtctgttgatcgtgctgggcctcgtctcgaccgtcagctggttcatccgctatcggtttctgaacatgtacagccggctacccccggagccgcagcgcaaggaaccgcagcttgacctgtttcccgatgtgcaggagggtgattccaagccggggttggccaattacttggatgaatttctcagcgcgatcaaagtttttggataccttgagagacctgtctttcacgagttgacacgcactatgcaaactaggaagttgatagctggagaaactctccaactcgaggaagagaaagggttctgcctggttgtggatgggttagtccagatttttgtcaagtctatgcgaacgggaagcacggactga

SEQ ID NO: 27739 - DNA, 540 bp, Emericella nidulans
gcaaaccgcaaaggccgcaccgcatcgtcggcggcgcgatcaatctcgggttcggtcagcgccagcacgtacatcgtcttcattgtcatcatgtgcctgggcctgcctattgccatccttctcagcccagcccataaggtgctgcgcaaggaccggactcttgttctcgtgcacaagcaggcctcgtgggcggcggaattcaaggccgcgttcgccctgatcgcctcgcgccgtgtcgtcatgctgctgccggcgttcttcatcagctacttctacaacggattccaaagcacctggctgaccagctacttcactgttcggtctcgcgccttctcctcgttcttcaccaactttgccgggatcatctcctccttcctcatcgctggcctgctggacaggcaatccattcacatcaagacgagggcacgagtcgccttatgccgcaatcgtccttgtgctcactggtacctggatttgggcgacatcctgcagtaccaattcgactacgacttgcctgagtctcagtctttgattggttaa

SEQ ID NO: 27740 - DNA, 753 bp, Emericella nidulans
gcaaagcgccttgagggcaagacaatcgtcatcactggcgcctcgtcaggcattggccgaagcacagccagggaattcgcgcggacagctccaaaggaccttaagcttattgtgacagcaaggcgcatcgacgccctcgaggagctggcaaaggagattaaagaggaagtcggcgagggtgtcaagaccctgcccgtgaagctcgatgtcagtaacccggaggaggtcaagaactttgtcccatctctccctgccgagttccaggatattgacatccttgtcaacaatgctggtctcgtcaaaggcgtcgctcaagcccccaacatcgaccctgaagatatcaacatcatgttcgcaacaaacgtcactggattgatcaacctcacccaagctgtcctgcctattttcaagaagcgtaggattggcggccgtggagacatcatcaatattggaagcatcgctggtcgtgagccctaccccggcgccctgaggaaagagctcatctccacgcgcatccgcgtcattgagatcgaccccggtcaagtcgagactgagttctctattgttcggttctacggagacaagagcaaggccaatgccgtctatgctaactgcgagccacttacaccggacgatatcgccgaggtcatcgtcttcgccgctggtcggagggagaacgttgtcattgctgatactttgatcttccccagccaccaggcgtctcccggtcatctgtacaagaagcctcaataa

SEQ ID NO: 27741 - DNA, 450 bp, Emericella nidulans
gcccttggcaacctaacagccgaagttggagttcggttcgtcgaggccctgcaggcgatctcgaacgaggcctttgctaaacttgggaacatcgacgcatccaagtgcgagaaccatggaacgggaatgaggcaagacgcacggggggcggccggctacagccagtgggctcaatgggtctcgtgtagagctagcatgagcactgagcagcagcgagacataccatttgtggtcccaaatccggattttgggccagcgtcgaccatgtcagctgagaccagttatgcacaggctgcagcggcacccggagattttgcgatgtcgcatcaggacttttccaacgcgattttatcgccggtacctctggatgtcgacccgcagatgatttggagccacgaggaccagttggcgctcatgggcttgactgggctggacatgctggaaatctga

SEQ ID NO: 27742 - DNA, 621 bp, Emericella nidulans
agatccgattacgagctaacaccacctagaatcggtgctgaactcggtgtcgacccgaagacaattttggctacatctcacggccgccgaagtattgatactctacagctgtatgaccccgcaaaagccaactgggaatacgtcagctacatcgagggactcatccccaaagagtacggttctgacgctattgaaatccccggcgcgcggtccatccttgctgccctcgaagagaccggcgcaacctggggcgttgtgacgtcggggacgcgcgcgctcattgacggctggctgggtgttctcaagctcacacatccagatgtcctcgttgttgcggaggatgtagaactcgggaagccagatccgcgatgctacctgcttggacgaaagaaaatgggtctagaacattcctcctcgatagtggtgctggaggatgcgccgtcacggataaaggctggcaaggcagccggtttcactgtcattgctttgaccaccactcacactttggagcagcttcaagcggctggggcggacgtgatagtggaggatttgaggagtattagcgtaaagggtgttgttgacgggcgtgttcagttggaggttcggaatgccttccaatag

SEQ ID NO: 27743 - DNA, 1797 bp, Emericella nidulans
tcccgaataacctttaatgctcccgaatcgagatctgaaaatggcgctagagactcgctagaactcgcgtctttggcctcgtcctctcccgaatccgccctcgacctctctcgctcatcttccccctcaggcatttcgtcctcgcgcaagctatcgctagaggatgaggaccccctttcgaactccaatccacatatgacccacttgtcgtcacgaccgcgacctgatcggtcatactctatctcttccgcattcgattttgggaggaatctgtttcctctgtcccagactgccgatggctacgctcccttgggggctccaactcaaatcgatggagatggcggtggtattgatggttcgttagagcggaataagacgttgacttatatcaatggattgtccctggtagtgggactggtgatcggctcgggaatcttctcatcacctagccaagtcaacgctaatgtgggatcacctggtggtgcactgattgcctggctcgttgccggattattagcttggaccggagcagcaagttatgctgagctgggaggcgcaatccctctaaatggtggtgcccaggcttatctgtctaaaatattcggagaattggcgggattcctctttacgtggtgcgctgtcttagtgctcaagcctggcagtgcagccattatctcgatcatcttcggagaatatgtggttcgagctatattaggtgccgaagtcgaacagatcagcccttggatcaacaaaggcgttgcctttggtggacttcttgttgtcatttgtctcaactgtctctctactcggttagctgctcggattggagatttattcatgatattcaaatttgtcgcattgatcggtgtcgccattattgggattattgttgccgccactggcctgtcagcgaaggggcaggccaatcaggaatggaaaatcagctggttcgagggcacgaacatggatatttcagatcggcccactgacacagcgcagacaaactacgtgacgggcgaatttaaaaacccaaatcgagacctcccgcgtgtgattcatactgcaatgccccttgttattgtttcttatctcttggccaatgtctcctacttcttcgtcctgccgcattccaccattgaagctaccaacaccattgccgtccagttcggtgacaaggtatttggcagtataggtgccttgatttttgcgcttatcgtttctgcaagctgtttcggtgctttgaatgcgactgttttcacgagcggacgcctagtctacgcagctggtaaggaaggctatcttccaacactgttcggcaacctttggacgcaaggctcgtccagcagcatgaaccggcttcaacgccagtcgtggatgagcaagttagtccgtcgggtctttggcaatgggacatggattggctacacacccattaatgcgatggcgctgaatggcatccttactttgctatatgtcatcgttggcgagttcggcacccttgtcaccttctacggcgttgcaggatacacgttctactttctcaccgtgctgggtctcatcgtgcttcgcgttcgggaaccgcagctagagcggccctataagacctggatttcgacgccaattatattctgctgtgtcagtcttttcttgctcagtcgtgccgtcatctccgaaccactacaaactctcattgtagtagcattcattgtcgctggggtccccgtttatatctggcgcatttacaagcgggacggtaagaaggcgtttcaaggatggagcctttggcattcacgatga

SEQ ID NO: 27744 - DNA, 321 bp, Emericella nidulans
ggtgaagacaaagaaacaaatatcctcgccggcctcggaaacaccatttcccaagtagaaaacgttgttgcggcatcgttacgacctttgccaacggcaacgggtgatggaacctacgttgccgaatccactcagacgggcttagccaaagatctgagccatgtcgacctcaaggatgtccgcacactcgccgaagtcgtcaagagtgcggctacgggagagccggttgatgacaagcagtatatcatggaaagagtgattcaggtcagctcagattccaacaacaagtatgcgcaggctctgaggctaatcaacatctag

SEQ ID NO: 27745 - DNA, 624 bp, Emericella nidulans
gagcaacaacctctcaactcgcaacctcaacaaggagacttgaattggcgactcagcgcccacccaatcaccctcctcactttcctcggcttccgcctgggagcattgctgatcatccttgtcttcatcctgaccctcctcctcctcagcgcagacttctactacctcaagaacatcgctggtcgacgcctcgtcggcctccgctggtggaacgaagtcaacaccaccaccggtgactcgcactgggtgtttgaatccgcagacccgaacacacgcaccatcgcggcaacggataagcgcttcttctggctgagtctctacgttgcgccggcgctgtggattggcttgggcatattggccatcgtcaggctgaatagtgtgatttggttgagtctgattggtacgtataccttttctacgcaaacacagatccggattcgcggtggttggaagggtgctgatttgttccgtgtagcgattgcgctggttctgacgatcacgaatacgactgcattctcccgctgtgaccgctttagccaggcgtcgacatatgcgaatagtgcgtttggaggcacaattgtttcgaatcttgcgggagggttgatggggaggctgttccgttag

SEQ ID NO: 27746 - DNA, 513 bp, Emericella nidulans
ctggaaatccttcgtgacttcctggacctcattcggccgctgctacctcccgggacccgcgatgagaggctcccagcgcgtgtttggacatggctggtttattatggagaaggtttccttgttccagggtcagcactcgaggatctgcagagcgttctcgacgcgggaataagactaacgcacccagaaaggcttgaagagttgcggctggtgattgcggatcttcagaggagcgagcctacgtccagttatctgatctctgtgaataatggtatcgcacggaacgcaagcgtcggtgcctctcccttcgagtttacattcggggtgtttgatatccagttgggtcctatcttgggaccaattgttgccgatgacgagaagatatcgaggctcatccagattctcaatgcccgcctcgcccctggagaggtcgaaaagacacgagagacactgcagtctctcaactcggtaggcccatggtttgcatcttctcatacccagagcgattcctga

SEQ ID NO: 27747 - DNA, 813 bp, Emericella nidulans
gcttcagtatacaaggcagtgtccaagagaaagtctcgcgacattacgaagcagcaggatcaggatgacgaagacgttatgatggaggaaatgctcgccgatgccgacgatacaagcgatagcgatgaagatgaagaaaacacggctgacgcagcaaagaagcagttagccgctggaatgatgccgaagacccgtgtgctgatgctgacgtcgcgcggtgttacatctcgtcaccggcaccttctcaatgatatgacctcattacttcctcacacccacaaagaaagcaagctggattcgaggaagaaggcagccggttacaatctgctcctgaactccctcgccgacctccactcctgcaacgtgattttcttcctcgaggccaagaagaatggtcaagatctatacctgtggctttcacggcctcctaacggcccaacggtcaaattccatgtcaacaacttgcacactatggcagagctgaacaccgggttcgctggtaactgtttgaagggtggtcggggtattgttgttttcgacaaatcattcgacgaacagggtcctgtcatgagccagccaggcaacgagtaccggggactgattagagagatgctccgcagcgtcttttgtgtgccgaagcgtggcgtcaagggtatgaagcccttcatagaccgcgttatcggaatctccggtgtcgacggtaagatctggatccgggtttataaaattccagagtccgaaagtggaagcaaaaagaaggaaagcgaaaaggtgaccgaaaagcctgcgcacaaccccaaggacggtccatag

SEQ ID NO: 27748 - DNA, 912 bp, Emericella nidulans
caggcacatagctacacgaatgccaccttctctgtcagttcggcacgctgtggcaacgacgacgggaagtaccccctcatcggaggcagcatgattgtagacccagaggggcgggccattgcagagacgaagacggttgaggatgaggtgattgttgcagattgtgatttagagctttgtaacgctggcaagaagcggacgttcgattttgcaaggcatagacgcgtggaacattataagatcctggtggagcaaacgggggtagatgaaccgcctctgcttgccgatacgtttgcggaagaggctcgtgcccctcctgttgagacgaactcgacgatatcacccgatatcatcaggggagatactggaccagacaagaaataccgcatcctattggtaaaccccaacgccacgtggtccatgacgtttaattgtcttgagatggttgcgccaacattaccctccgatatccaagttgacggcttcacatcgccgcagcctgcgcccactgcgatcgagggttcgctggacgcagtgctctccacggccgccgccgttcgcgccattatcccaattgcaaggcagtacgatgccttcctcgtcgcctgctacagcgagcacccgcttatcaaggcgttgagagaagaactcactactcctgtggtgggtattatggaggcatctcttttcgctgcgaggacactaggaggccggtttggcattgttgttacctcatcaaggtctggagttctccacaccgactcgattagacgctatgggtatgaaggattcagcattggcgtgagatgctgtgggcttggtgtccttggtcttgagaggaagggagagcaggaggtgcttgatgcgatgtgtggtctgcgcgaaaactcgtcgaacgcggggcggatgtga

SEQ ID NO: 27749 - DNA, 870 bp, Emericella nidulans
gccgtagcacttgcctccatcgagcgcaactggacacaagctgtttctgctggcccctccgctacgcatgaggttttggacgccattagcctcagcatcgagaaacatcccaagtctgctacgatgaagaacctttctgtcctgacaacaattctcttccgggcattcgacctccgccgagagcagacacagtcttctgaatcggcgttcgacgcgtcagatctcgaggagattgaagatctgatcaacgatgtcacgatcaaaatgatctacaagctcaacgacacagcgttccgtcctatttttatcaaactcgtcgagtgggcgaccgggcttccagagaagaatacccaaggcggcttggcaaggttgactaccttctaccgcttcctgcaggtctttttcggtactcttcagtccattgtcaccggctacgccagctacatcatcgaaagcgtcgtttccgtgctcgaaacagcacagcccctcaaacccgaacaccaaatccctttggcttgcaacaatgccgccttcgagcacgaccaggatgaattctggcaatccccctcacatatcaccaagatctccacacctctaatctcccacctccgccacgccacctccaccacaacaggagcccttgtcgccacggaaacaatccccacaatcaccgagctcgccgtcgctgctgactcaacggacaatcataaggaactaaacaccgtgcttatgcgtttcctgcggccgtctagcgcgtccctttccagcagcagtaccaagagggccggtcctggtcttggcggcgataacccgcaaaccagaattgcggcgctgaagaccgaacaagcgctcacggaacacctggggtga

SEQ ID NO: 27750 - DNA, 522 bp, Emericella nidulans
aatcccaatcagccgaagccgactctgttcaccaaactttatgatgcgtcgcttcacaaggaaggggatggggagtgccttagcgatcgcgagatcaggaatgacgcgcagagctttatcgtggctggaagtgacacgacggcgaatacgctgacgtacctcgtctggtctgttctcaaggacaggtccatccaggagaaacttgtggaagagctggatgtattggtcaagacgctgaacgtcgagcaagggatcaccgaggaagaactctctgacgtccacctccgagagctgcaatacatgaaccaggttatcaacgaggcactgcgactgtatcccgctgtaccgtcgggattgccgcgagttgtgcctgacaagggaagtactctcgctggacattggcttccgggtggtgcgacagtaacgacgcaattgtactcactccatcgggatgaggaggtctttgaggagccggaacggtacactatttctcctcctcttttgcagccagtggggcagtaa

SEQ ID NO: 27751 - DNA, 795 bp, Emericella nidulans
tcgcagcctacggattctggtgccaccgggaaagtccgtctcttttatggaggtccctttcctcgactacgattctgggagtcgctgcactatgtcgaggtttcttcgtgtacatccgctcattctaagcacggcggcattgctcaaccagccgtgacccaggcaattcgacttctgtcaaagggcccgtttcccgccgaaccgcaccttgcgaagcctgaacgccagagctggagcctgcagaacgtctgcgtcgacccgttttcggatctccctacggcctacactacagatggtgaagattcgcacctcgcgccatccgcatactcctgcaactcttactcatgggtccatatcttccctgaaggaaagatccaccagtcaccgaataagaccatgcgatattttaagtggggtgttgcgaggttaatactggaggccagcgaatgcccggacattgttccaatgtggttggagggcttcgaccaggtcatgcacgagagccgcgaatttccacgattcctcccacggccggggaaggaagttagtgtaactttcgggcagaaggttgatactgaagcagtatttggggagatgcgaaggagatggcagaagctcaaggccaaagccgagttagcttcgcctgagacgcgcgatcttccgcttggtgcgttgagcgacgagcttctgtatggtgacgaggccgtcgtgttgcgcatagaagtcacgaagaaggtcagggacctcgtcctggaagtacgacggtcaaggggtcacctatatgaggacccttag

SEQ ID NO: 27752 - DNA, 2445 bp, Emericella nidulans
gccactcccttcctcgtctcctacgaccccgcctccgcgtccggcggcctctccctccagcagatcgcctacttcggccgcgttctgatcaaggctaccgacctcgcccaggctgagacctttatccgacaaaatttccgcctactcgatatctacgtcgacgcaactggcatctccgcaacgggcgatcttgtcgacatcctcaacgccggcgcggccaagatcttcatctgccttgaccaattggaagcgtttcagaaatgggtggttaagcacattgagcgcgaagaggccggcctgtgcacggactcggccgatgtccactctatctctgtgaagctcggactgaacccggaagcccagcttctctaccgtacatattctggagacgtgaccgaggatgcggtcaaggatacaatgaagcagggaggtgtcagtattgttcctgcggccgctctgactatcagccgcgaggagtccagtgggaagatccaggcgggttctttgattcgtgcgcggggtgtcaaggaccagggtaatggtctgtatgccacaacagtaacggacgagaggggtacttgcttggggtttgtgtggagtagcgacgagagtatcgcggaggctctgcgtacaggcaccggtgtctaccagagccggaagcgtggtctgtggtacaagggtcaatccagcggtgacgtacaggagttgatccgcatcggatttgactgcgacagcgactgcttggttttcatcgtgaagcagatcggaagaggtttctgccacctcggcaccgccagctgtttcggaccttacaccggtttatcacgcctccaaaagacgctacaagcccgcaaggccgatgccccggccggctcgtacaccgcgcgactgttcaacgagcctaagcttacacaagccaagatcatggaagaggctgacgagttgtgtcgtgcggaaacaaaggaggatatcgctttcgaagcagccgatcttttgtactttgcgctcacccgctgtgttgccgccggtgtcagccttgaggatgtcgagagaaaccttgacttgaagagcctaaaggtgaagcggagaaagggtgacgccaagggcccttggcgagagaaggctggtcttgccgagaagcctgctgaagcgaacgctgctccgaagccagaggagccaaaggaagacacgtctcggatcgagatgacccgtgtcgctaccgcttcgacgccggcggagaaggtccaggagtacctcaagcggccatcgcaaaagtcaaacgacgccattgtcggccttgtcaagcccatcattcaggatgtccgtgagcagggtgatgctggtgttcttaagtacacacataagttcgaaaaggccacatctttgacctcacctgtcctcaaagcaccgttcccggccgagctgatgaagctgtcaccagaagttcaggaggcgattgatgtcagtatttccaacattgccagattccacagcgcccagaaaggcagcaatgatgcattgtcgatggagaccatgcctggcgtagtctgctcccgcttctcgcggcccattgagcgtgttggttgctacactcccggtggaacggccgtgctgccatctactgcaatgatgcttggtgttcccgccatggttgccggctgcaagaagatcgtctttgcctctccacctcgtgccgacggcagcatcacccccgagattgtctatgtcgcacacaaggttggagcggagagcatcgtccttgctggaggcgcgcaggctgtagcagccatggcctacggtactgagagcgtcagcaaggtcgacaagattttgggacctggtaatcagttcgtgaccgccgccaagatgttggtttccaacgatacctccgctggtgtcagcatcgacatgcctgccggacctagtgaggttctcgtcattgccgacaaggcgccaaccccgccttcgttgcttcagaccttctcagccaagcagaacacggtgtcgattcccagggaccttgatgaggcaatggctctgagcaacgattacgctcctgagcatctcatcctgcaaatccagaatgcagaggccgctgtcgagaaggtccaaaatgcgggatctgttttcatcggacagtggacgcctgagagtgtgggtgactactctgctggtgtcaaccactcattgcgtacgttcccaactcctatgattcttttaccaccgattctaacttctcttcctagcaacatactgtacgccaagcagtactccggagtcaaccttggctccttcctcaagcacatcacctcctcaaacctaacggcggatggtcttctgcgtctgtccaagactgtcgagacgctcgcggctgtggagggattagatgcccacaagcgggcagtgagcatccgtgttgcggctatgaagcaggagcagttgtag

SEQ ID NO: 27753 - DNA, 1917 bp, Emericella nidulans
ggcgaggagcgaacgtacactgttttgaacaccctagagttcaattcaaccaggaagcgaatgagtgcgattgtccgcatgcctgatcgcagcataagactattctgcaaaggtgcagatagtatcatttattcgcgtcttgcaccagggaagcaacaggaactacggaaaaagacagcacagcatttggagacttttgcgcgtgagggcttgcgaacgctttgtgttgcagaccgcaaactctctgaagaagaatatcgggcatggagcaaggaacacgacatagctgcagctgcgctcacagaccgtgaagaaaaacttgaaaacgttgcaagcgctatagaacaggatctcatgcttattggaggcactgctattgaggataagctgcaggatggtgtacctgatacaatatcgctgctagccagagcaggaattaaactatgggtacttactggcgataaggttgaaactgccatcaacattggattttcttgcaacctcttgaccaatgagatggagctgattgtcttcaacattcccggagaccaacggcatcaggcatcccgggaattagacgaacacctccgcaaattccagctgacggggtctgatgaagagcttattgaggcacgacaaaatcacaagccacctgaaccgactcatgctgtcgttattgatggcgaaacccttaagttaatgctctcagacgagatgaagcaacgattcctccttctttgcaagcaatgcaagtctgtattgtgctgtcgagttagtcctgctcagaaggcagctgtcgtgaaacttgtgaaggacggactcaacatcatggcactctccattggcgatggagctaatgatgttgctatgattcaggccgctgatgtcggtgttggtataattggtgaagagggcagacaagccgctatgtcggcagattacgccatagggcaattccgattccttcagcgtcttattcttgtccatggacgttattcttaccgacgcctgggagaaacaactgccaacttcttttacaagaacttggtttggacattcgcgcttttctggtattctatctacaacgactttgacggctcatacctgttcgactacacctacatcatcctggtcaatcttgcgttcacttcattaccagtcatcttaatgggtattttcgatcaggacgttgatgacaaagtgtccctcgccgttcctcagctgtatatgaggggcattgagaggctggagtggtctcaggcgaagttctggctgcacatggctgacggcttttatcaatccgtgatatgcttctatatgccataccttctgtatgagcctgcgaatttcgtcactgagaatgggttagatgtcagtgatcgcaaccggatgggcatccttgttgcttcctgtgccgtcatcgccagcaacacctacatccttatgaacagctataggtgggattggctgacggtacttatcaacgcgatcagttgtttgcttatcttcttttggactggagtctactcgtctgtccaagcgtcagcgcagttctacaaatctgctgctcagacatatggcacacttactttctgggtggtcctcctcttgacggtcacgatatgccttctccctcggttcgtggtcaagtccgtccaaaaggtgttcttcccgttggacgtcgacatcatccgtgagcaaataactcaaggcaaattcaaatacctcgatcagtatgagacgtttgtaccgaaggcagctggctctgcaaatgattctgcggcgtcctctgacttggggaagccggtcgattctggtacgaggcataatcctttttcagatgatcagcagatttatgcggaatccgttgccccgaccgcccgtacccataatccgcgcggccagaatgagaagtaa

SEQ ID NO: 27754 - DNA, 834 bp, Emericella nidulans
gccgcagtcctccaaagccagaagaccgccctaattaccggtgcagcatcgggcatcggcttcgccgtcgcgaacgtctgccgcagtcggagaatgcaccttgccctgctcgacatcgacgccgccaatctccaaaaggccaaggaggtgctggtatctgagtcaactgactcatcgctaaagacagaagcatacgttattgacgtgggtgacaagtcgcaatgggatagtatcgccgctcaggtgcagtcatctttcgcgactctcgaccttgtcctcttgaatgcggcgcggggcacgaagcccaaggaattggatcccgcggtcctcccagttcttaagaaggacccgtcctcggccaaagcgattatcatcactggctcgaagcaaggtattaccaatccgcctggcgcccacaacccggcctacaattcctcgaaaggcgcaatcaagatcctgaccgaacacctggctcacgatctccgctctgacagtgcctcagcacatatctcagctcacttgcttgttcctggatggacatggactgggttaatgggaaatgtcggtccgacggatgagaaagagatcaagaagatgaaagggtcgtgggcaccgagtcaggttgcagaggagctggagagggggttgcagaggggctcattctacattatctgcccagatgatgatgttgatcgagctttggatcaggcacggatgcagtggggttgtgaggatattctggaggatcgcccggcgctgtcgaggtgggaggagggttggaaggagagggctgagcaggcgattcgagactatgctgagaggaggaggaaatag

SEQ ID NO: 27755 - DNA, 807 bp, Emericella nidulans
ctgttccacagcgttcccaaactagccctgtttatcccgcttctaggaacctgcctagcagagctcctcaccccgttcccagacaccgcgagcgatctcgccatcaagttccaacccgttctcgacttcgacacagacagctgctaccagaccgcagtcatcggcaaagactacctggtcaactctgatatcgacccaaaccttgctccaccccgtcctcccggtccagggcccattattcgagccgccaccgatgacaaccaagttgtcttcgctgtcaacgctagcaacagcgacagcgagattgggatccgctcgggcggtccctacgcaccctctgggtgccgcgacaagatccgactagaccgcagccagactgggttttcaaacgcacacaagcacgactgggagctcgtcaacgtgtggacgctccacgaccaagtgtttttcgtctcgtggtctgcgcacggcgactacacaacgcactactggtcgacgatccggttcaaaggctcgcacccgaagatcgtgtaccacctcggttcgtcgggtacgcactcgctgcgcaagaccgaggccaaggacgatgagattgaaaacgacaccgggcggtggtttcgggcgccgcttgtttcgctagagaagatgccctgcaaatttaaccaggagctgctgaataataattggggcagcgcgcatagtgatttaagtaggtttggggagaagctggataagtggatgccgtgcgatgcaaggaataacgaacattttgacccctgggagcccaaggttccttcgtggctgtga

SEQ ID NO: 27756 - DNA, 387 bp, Emericella nidulans
catggcatcctcgctctgtcggctttgcatatcgcatgcacccgaacaatgagagctccaggtgacgccaagagcgactacctccatgttgccatctcgcatcaagaccaggcgctcgcgcttttccgcgaacaactcgccgacattaacaccagcaatggcaaggctatgttcgcttttgccagtattaccgtcttgtatgccttcgggttcccgcgcactcctgagccgggtagttctgcggttggcgacctagttcaagcgtttgtgcttactcgtggggtgcaggacatcctgaaccagtcgatgaacactattcttgaagaccgtacttgggcgccattacagcacgtgaacgactatgatcctgcagcaattgacacttag

SEQ ID NO: 27757 - DNA, 777 bp, Emericella nidulans
ccaatcaatcaaccctcgaaccagataaaattcacaaacgtctccgtcgtgcgcctaaaaaaaggcaagaaacgcttcgaactagcctgctacaaaaacaaactgttggaatatcgttctggcgccgaaaaagacctcgacaatgtccttcaggtccccacgatcttcctttctgtctccaaagcacagaccgcacctgcagcggaattaatcaaccgctttggccctgacacgcccgccgacgaaatccgccaggaaattttacgaaaaggcgaagtgcaagtgggggagcgcgagcgaaaagaaatcgccgagcgaattgagaaggaggtacttgatattgtttcaggtcgactgattgatccgacgacgaagagggtttatacgccggggatgatttcgaaggcactggatcagttgacagcggcgagtgggcagatgcagcagcagcaatcagcagcgcagacaggagaaaatggagcgggtgatgaagacgccgcagcgcctaggcaacagaagaaacctctatggacgggtgtgaacccaaacaagtcggccaagagtctcgcgcttgaggcgatgaaggcgttgattgcgtggcagcctattccgggaaagaaatcggctcgccgcggtgacgacactgactccgagggtgagagtgcgcctgtccagccaaagggcccgagcaacgtcaaggataagatcctgagttttatcgaatccattgagtcacaggagattgctagcgatgaatgggaggtgaactaccagtaa

SEQ ID NO: 27758 - DNA, 546 bp, Emericella nidulans
gtttcccagacggctcttattgcggctgcattgtcgcttgctggcctggagttggttgctgcgagcaacccaacgctcaccatgagcacaagcaactcaagcttatttggctcttccgaccagtcgaacaacctgggttggcttgaatcgttcctgagctcaaactctgactctggaaccacctctagcactaccacctcccagaactctggtgttaccgccgcttcatccaaggactccgaccccgatgtcgttattgtgcccatcaccctctctgtcgatgagaatggcaagacacatacaataaccggcactgctaatactggtgttgctacgggtgcagcttcgactaccacaaagcagtcaactgtagccgaagttaccgcctctgcaactacggagtcgcagccaaccgcaactagcacctcgtcttctacgagagaggacactgatctctccggtattctgggaagtcttcttggtgggtcaagcagcagtgatagtagcgctagcacaacccaaaccgtatctcccggctgccactga

SEQ ID NO: 27759 - DNA, 486 bp, Emericella nidulans
aacaccacgcgccacaggctccttgccaccgcgtcgcggtttgtcgagacactcgagagcttagacgtggatgcaatgctcgctatacgatcttcaacatgtcttcatcatatgtgctgccccagcttcagaaactacagcatcacgaatgatcagacccgtgaagcgtttccccagtggaaagctacgattaccaagtataaatttggtgtcctggatgacagccaaattctggtcgacgagcaagcgagaaaggtcatgattcacgccgaaaccgccgcagagacaacggtcggtgactacaacaatgaatatgtgtttattcttcgaatggcagaggattgcaacacggtggatgaaatctgggagttttatgataccattcgtctacaggaccttcgtcacaggctggaggccagccatgtgccaattggcgttgacgctcctgctccctttaccaccactgcctcgactgcggccctctaa

SEQ ID NO: 27760 - DNA, 561 bp, Emericella nidulans
ctgaacgcgttcatccgcatcaagaacgaaatcgaccccaccgtgccttccgacaaagttgccgtgagggagttaacaatggcaggccgtattcctactgacgccaccaaggaatcccgcatctacccgttgccacacacctacgtcgtcaaggatctcgttcccgatttgacccagatctacaagcagtacaagtcgatcaagccttacctgcagcgcgataccaagaccgaagatggccttgagaaccgccagagccccgaggaccgcaagaagctggacggtctgtacgagtgcattctctgcttctgctgctcaacctcctgcccgtcgtactggtggaacagcgaggagtacctcggccctgccatcctcctccagtcctaccgatggttggccgattcgcgtgaccagaagaccgccgagcgcaagcacgccattgacaacagcatgagcgtgtaccgttgccacactatccttaactgcacacggacctgccccaagggtctgaaccctgcccgggctatttccgagatcaagaagatgttggctgctcactag

SEQ ID NO: 27761 - DNA, 1014 bp, Emericella nidulans
atttacctactagaagatgccctagaactctggagcgccattttgttgcaaaccccatcgcccccttctcccgagattctttccctcatccctgccctcttccccatcttcgaatccgccatcgacggcgtgggtctggccctccagattgcggagtcctacatcatcctcgcaccccaggagatccttagcgaccgcattcgtctcccactctttacctcgttcgagtccctcctccaacccacgctccgccagcgcggcggcgtatctatccgcggcgccgacgccgtagacaacggcagtgaaaacacataccgtgtcatcatcagctctttactcgatagctccctcctatcttcaatcctcgaaggcctctactccgcttatgaatccagccaaacaacagggccgaacaaaaaacaaacgagcatctacggtggcgttgaaacagactacttctctgtccttgcacgtctcgccctcgcacacccgacgctcttcgtttccggcatcacagccgcttactccaatagcaacatcagcaacaacagtcaaactccagaacaggcgcaggaacatctcatcacctggctcctaaccgaatggtttctgcactacgacaacatcggcaccgcaacgcagaagaaactgcacgcgctggctttaacccagcttctcaccctcagtgggcctaatacccagccaccggcctatatcctaaaccacctgcaatcgtacctcaatgtttggacggatattattaccgagttggcggagggcacgacggagggtgatccaagtgatcctcgcggtggggattatctcatctactggaataatgcgcagacggggacatatgaagataacgagccgccagaaaacatgcgacggcgtgagtgggaaagctcggatatcgttcacaagacaaacattcgagagtttgtgcgcgacgggctgcagtccttgattcgttgttcccattttgtcgctggagaggtttcggccgcctcctaa

SEQ ID NO: 27762 - DNA, 408 bp, Emericella nidulans
ctgcatgccctcctccacggcgtcgacagtgaaacgggcaaaaagctgtccgagagccaagtcctcgacgagatcattaacatcttcatcggcagcgcaacgcgcgccaacctcctctcctttgggctatattatctcgccaccaacccagacgtcgtcacaaaagctcgcgaggcactcgacgccgttgttggttccggccccttcgagcacgcccacctgtctcaaatcccctacaccgagggcatccttcgcgaatcattgcgactcagcgccacagcaccaggcttcaacatcgagccgatcccgtcgccgggcaatgagccgtccttctcgccgggggaacgtacaagtccgcgtacgcaactctatccgctgctgaccgcgtcaacgggaccggagtcttga

SEQ ID NO: 27763 - DNA, 1047 bp, Emericella nidulans
ttttcccatatcaaacaagagcatgatgcctcctcaccttacattaaaccggatcccgagaccaaagacactgttctcgccgacatcgacgatgaagacgtatatgaggatgatggtgacctagactttacaaacgccgaccaaagcttatggctttcccgaataccccggtcgctctgggagcattggtccaagctggatgatgatgatgaaattcagatcggcacagtcagtttacgcctcaccgaaagcgaggagaaccgcgacattcccaaggactatattttgtcgcggcagacgctgaattcggaaaacctgctacacatgacccagaatacatatctcttcacagaaaaggacattcctggttacgaaaatcggatggtcacttttggcgaagcgaggtctgctttatacgagtcgatgaagcgcgatgcaaggagaaaggagcggaagaagaagtgggagccctatattcgcaaaactattccgatgaaagaagagttcaactgtcttcctgtcgaaaacgaagaattcagaatcctctcagagaagaaggctctggaagctctgaagccgagacgagaagttaaatacgttgataaaatgccggccaagttgcttcaacaaaggcacgctctgcctggagagcagggcgcgtttgtgcaagctacgaagccggccaaactcaaagcgcaggaaaacaagaccactcgtatgccgcagaacgagctgttggatcttatttaccagtgctttcgcgaatacagatactggccatttaagacactcaaagctaggcttcgccaacctgaggcttatcttaagcaaacattggagatgattgcgcacctagtgaaatccggcgatttcgccatgacgtgggagttgaagcccgaggcaagagagagtaactactcgaacgctatggacgtcaaacaagaagccgcacccggtttggactataacttcgatgagggctcggaaaccgatgcgatggcatccggcgtggataacgatgatacgcaattcgagaacgtggtctag

SEQ ID NO: 27764 - DNA, 318 bp, Emericella nidulans
gaaacggacaacgtcggcctcgacgagacacagtaccgcaccgtgcgctccattctgggcaccaaacagatccagtcgaagatgctcctcgagctcctctccatcgacgccccctgcgccgaagtggtgatagacagctggaaaacgatggtctcgacgacggcaaagcaagacaagaagcgcgtgtttggaaatttagacgaatacgtcgatttccgaatcgttgataccggagctccctttgtcgacatgctcatgcggttcggtatgggaatcctcttgagcgaagacgagcagaggatggttgaccgctggtga

SEQ ID NO: 27765 - DNA, 309 bp, Emericella nidulans
gtcattcctgtcaagctcgcagcagaagctgccttcctctccatattctcagtggtggactcggactccgccgtattcgacaagtacatggcagggcctggcgctgaacttccgccaggacctaagcggagcatgtctgactacttcaaacgagttgcgatgcgcctagctacccaggcgcgtgagagaagggaggctgaaggcggacagggcggtctgggactgtctaacgacgaggtcgaggacgaaaaggaggtgtggagcattggaaaagtcgagttggaggagggttcgaatggcgacgagtga

SEQ ID NO: 27766 - DNA, 450 bp, Emericella nidulans
tatgccgtctatttccctcgcccccgcgcgtcgtcacgcaacaacgctcacaatcccctcccccagcttctccaaaccccctccggcctcgccctcctcgagctccaaggcacgataaatctaccattccaggaaaatcttgacgccgagaacgaatccaccgattttaacagcccctccacatacgagaccccaatcggcaagctcatgtttccggactactcgcaaaacgcgaaagacgacacgagctggatgaaaagagcttacctctatgttggacggtaccagaggatgacaggcgaagtcaagaaattacccaagccacttgcgattattcagcggcggcagacggacggcgcggacgatgcacgggaacagctagaggttgtggaaattgtgaaatataagctcatattcaagaaccggccggagccggttaatgatgtttga

SEQ ID NO: 27767 - DNA, 792 bp, Emericella nidulans
cttcgagccgtcctcctccctactcttctggccttcggcgccttcacccccgtccatggcgccaattcgccaggctgcggtaaacagccgaccctcaccaatggcgtcaaccaaataaacggccgcgagtacgttctcaaaattcccgatggctacgacccaagcaagccacatcatctcatcttcggccttcactggcgcggcgggaacatgtacaatgtccatccagccatggtacgcctcgaggcccgcgcgcaagggagcgcgatctttgtagcccccaacggtctgaatgctggctgggccaacaccaacggcgaggacgtggccttcatcgacgccatcatggagcaggttgaagacgatctctgcgtggaccaggcctctcgcttcgcgacagggttctcctggggcggaggtatgagctatgccctcgcttgcgcgcgggctgctgagttcagagccgtgagcgtactgagcggtggcttgatcagcggatgtgacgggggcaacgaccccattgcatatttggggatccacggaatcaatgatcctgttcttccgcttgacggaggtctgattgctggattgttctctcaagctactattaatgatatatttcactattccgcgcgcggctcgatcgtctggctcatgggtcgggccgtcatcctgcgagccacgctcccgaattgggatactgttatggtccatgcccatacaagaaccttagacctttgtaactcggccaaggcctacgttgtcttgaaggcgagggtgggaaccttctag

SEQ ID NO: 27768 - DNA, 822 bp, Emericella nidulans
gcctacgacccgcgattagcgggagcaggaactgcggcccaggaaaccccggcacctccttcgcctacagaggcagctgtaacgacagctactgctccaagtgatagcacttcaagctcaacagagaagacagattcatacaagctgcgcttctgcactgtatgtgcatcaaaccagaaccgctcgatggaggctcacctgcgtctatccaccgcagcgtcgccattcccagtaatttcttttggcacgggttctctagtccgcctcccaggcccctccatcacccaacctaatgtttataatttcaactcaacctcctactcccaaatgtacgatgagctcctttccaaagacgagcgcctgtaccgcaataacggcatcctaaacatgctcgaccgcaaccgcaacgtcaagtggggccctgagcgcttccaggactgggtgcccggtgacaagggcgcactcgggactgagggaggcgtagtagacgtcatcatcacctgcgaggagcgctgctgggatgctgtcgtcgacgatcttttgaacaagggctccacgctcaaccggcctgtgcacgtgttcaatgtggatatcaaggataatcacgaagaggctcttgtaggcgggaaggccattttggaactagctacgcggctgaacgaagtcgccacccaggaacaaaaggctctgggctcaggtggatgggagaatgggacgggtgaagctcggaggagctttgatgagaaggttccagaggtgcttggagcatggcaggagaaatggcctaatctgccggcattatggactttggcttggttgtag

SEQ ID NO: 27769 - DNA, 816 bp, Emericella nidulans
tgcttggatggactccctcgtgctgtatcgctgtacgcgctgtttacctacaacgagccgcggcacttccccagggcacgacaacatccgaagtcacaagtgacatccccccaacctacagcggggaattccaccgtagcaggggaaagaagatgtgattttgactcgatcaacgacttcttcagctatgccaccgagaacggattgaacatcacggtggaggtgcagaactgccagaatctgtgcctgcttacgtatggagtcggcaacccagatctctcaggaattggcatgatgtacgcatacagtatccagaccgcgttcacgattctcctcggccccgtctaccgactcctctacctggccttcgcccaagccagcgtcttcatccgtgacgccaaagacatccagctcaacttcttctcctccaatgggtttttcattggctcgtctgcgctggcttcactcgcccatctatcccagaacccgtcgaccttcgaggtggccgagattcaagccatggcgttcctgcaggtcaacagcgtcctagtcactttcttctgtatggtcgtcgcgcagccgatgtcgcgctggggtgcgcgagtgctcctctacattgtcgtctttgttctcatcatcgtcaccctgggggagagccatcttaattccgacagcaaagagaactggcgcctcgcctcggatggctgcgcgcacagctcgtcggactacagcgtcattaaccccgttccttacccatcttggctgtcgctgtctttgcagtcgcgggaacagttgcgttctggctgcagtcgttga

SEQ ID NO: 27770 - DNA, 483 bp, Emericella nidulans
ttgaaggatctgaccatatccgacattcattccttgggaaagacccaagccattgagattctctcccagatcacgcgcattgagaaaaagactttcccagcaagcgaggtgtatccatttggggaggagctctggcgaaaaaaaccgaataccagggtgctctatgtgacccaaacaccgcaggggccgttgatcgcctatgccctctatgttcggcagaaagggattgccttccttcacaaggtttgtgtggcagaagcgttccgccagaagggagttgggatgcagctgctgaagtacattcgaactcggttgcaaaaggaaggttgccaatatgttcatctctgggtggataagggcagatggtctgcacggtcattgtacatccgtaacggctttgaggaacgtgagctgcttactgattactatgcaccgggaagggatggtatcaaaatggtcctcgatctcgagcgtgggatttga

SEQ ID NO: 27771 - DNA, 699 bp, Emericella nidulans
aggaaatatgggctaactaacgaatgcagtcctgcccagtatctatacccacgcgggaggtacaaccaaggactgaaagtgatcaatgactttgtttggccattcgttcatgacacactgggctttcaagcggacgatctcaagagctccgataaatcattcaccttcctccatgccctagccaactacacccgcagtcccaagactatccgcgaccaagttgtatcaattcttctcgccggccgtgataccaccgctgcaaccctttcctgggctttttacgaactctcccattatccagaagcctactcgaagctccgcgccgagatcctcgacaaggtcggccccactcgcgctcctacatacgacgacctcaaaaatatgccctacctccggcacaccatcaacgaagtcctccgcctctatccagccgtgccctacaacatccgcttcgccctaacagacacaaccctccctataggcggcggagtaaacggcgatctcccgataacaatcctgaaaggtgacgcagtggcctactccacatacgccatgcaacgccgcgcagacctctatcctcctgtttctgagaagtttgcggacccggctatattctcaccagagcggtgggagagatggggtatccattgtgaggatcctgcagagagttcgaatcaaataccaagtattgccaactag

SEQ ID NO: 27772 - DNA, 342 bp, Emericella nidulans
ctagccctaacccagaatccccagtacgccgcggggatgcgccaaatcgcccagctggacgaccaggttgccctcatcatccaggcccttacgcattcgcgcgcaaagcactcctttttcaccgcgctcagcaaggacccggctacgtttgtccgtcgctggattaactctcaacgcagagacctcgagacgatccttggcgaagctacccggggtggtggcgaggatgccagtgggcccgagttccgacgtggtggctcaaacagcgtttgggatacggctgttgctcacgaggctgtgcggtatatgcttgcgaagcccgacgctggtatgagtcggtaa

SEQ ID NO: 27773 - DNA, 507 bp, Emericella nidulans
aagctaagtcccggttctcttgaaaaccatgaccttgtgaaacgcgcattcgccggcgatgaggtcgttcaagagttcgagcaggagaaacttgacactatcgaggacgagggcgacaaggtcatcgacgagacactccctggctggggcagctggactggagacggcattagcaggaaggaaaggaagcggcagaagcgcgttttgacaaaggttgagggagtgaagcccgaaaatcggaaggatgcgaaactttctcgtgttatcatcaacgaaaagcgtattaagaaggtaaaggcttttatcgatttcgcacccatcgacaacaacaagtaccttgcgacgcaactgcctcacccgttcgagtcgaagcagcagtacgagaggtcgcttcgtgtcccgattggtcccgagtggtctacaaaggagactttccagtcttctaccaagccccgtgttatgatcaaacagggcgtcatcaagccgatggagaagccgatggtttag

SEQ ID NO: 27774 - DNA, 486 bp, Emericella nidulans
gcaagcgaggagctacaacagaaagatgctgagatcaagcgagaggctgaaagacagcacatgatcattcaggaacaagggccccggattaggcgaacccataagggagaagaactcgttgaggatgatcagactaatgtttctactgagcctgtcttctcaaacattcctcgtcgcgttaccgagacggatgggagtccggcggcgcagagtccaactagtccaagtgctaagcagccagagactgacggccataaggtcaagacagacgctacaccagctgaacccacgcctcatgacgaacatttcccgacccggagccattctcctggcgccggtcaggaccaagtcttcccggaggtggccacacacattagccagccaatacccactggcaacgtccaggccgatgcagagattgatcagttgttgaaagacgacgacgaacccgagtctccacatattcaccgaagaccaccacgatga

SEQ ID NO: 27775 - DNA, 408 bp, Emericella nidulans
cctggcggaaagggaaagtctatcggtggaaaggcaggctccaaggactctgcggggaaggctcaaaagtcccacagcgcgaaagccggtttgcagttcccatgcggtcgtgttaagcgtttcctcaagaacaatacgcaaaacaaaatgcgtgttggcgcgaaagccgctgtctacgtcactgcagtccttgaatacttaaccgctgaagtgctggaacttgccggaaatgctgccaaggacctcaaagtcaagcgtatcacgccgcgtcacctacagcttgccatccgtggagacgaagagctcgacacgcttattcgtgcaaccattgcttttggtggtgttctgccacgcatcaaccgcgccctgctgcttaaggtggaacagaagaagaagaaggacgcataa

SEQ ID NO: 27776 - DNA, 906 bp, Emericella nidulans
cccctcacaacgtaccacctctcctcgtctaccaaaggcctctctagcatcacgacgcttatcgtcggcactgaggaagcagtcctcatcgatcctccatttctcaagcctgatggagaagccgtaacatcctggattaagaaaaccagctctaaaccgctgaaggccgtctttgtcacgcatcaccaccctgaccacttcttctccgcaaactcgatctttgaggccttcccggaagcaaagttctacgctgccccgtatgtcctggccgggataaacagggagtacgaggataaagtgaagtactggccgtcagtgttcggagcggagaatgtccatgtcgcaccgcgacggcctgaggcgttcgatttcagcttcttcgttctgaacggagaccccgctagtcccgttgtattgctaggcccgctgcagggcgacagtgttgaccatacgctgttctggctaccgagcgagaagacgataatcaccggggacgccgtctacggacggagcactcatgtttgggtcgaagaagtcgaaaccccagcgctgttggaggcatggaacaagaccctccgtctaatcgccgcactgcaaccgaccaagctgatccccggtcacatggagaccgggtgggagttggacgcgcaagaagacctcgcgcatacgcagcgatacctggatttattctctgaaaaggtcacgcatgcaccaaagaaggcttccgtgcaggaactgtttgatttcttcaaggggcagttcccgcagtgtacggagaaccttgagttctttttaggtcatctcagtaaccagtacggcgaaggaggccaggtctgggaggaaaatcggcatcataatgtcggtgtcaggacggtggaagggttgaatggatactggttcaagtag

SEQ ID NO: 27777 - DNA, 525 bp, Emericella nidulans
gccaacaaggctctcggaccggtgtttgtagaagcgctgcgccagaacggagttacaaaaggtctcgttatctgcggtgaagaggatctggatgagattagctgtgcaggaaagacgaattgctggcaattatccgagatccctaaccccgactacgatctgtcaaaagaggatgacgaagatgaggagtacaggactccccccacaatagccaaactggatgaattccagctcgagcccgccgatttcggtctgcctagctacccgctgactgctgtctacggacggaagatgcctaaagacaatgcggccaaactgatgcagattttacgcaatgagctaccccgagatgatccaatcctgagcttcgtgctcatgaacgtcgccgcgctcttggtcattaccgaacgtggtcctggaggcggtcgttggaaggagggtgtccgccgagcgcgctgggcgatcgagagcggctcggcattgaaatgctttgaggagttcatcgaggttacaaacaagctttaa

SEQ ID NO: 27778 - DNA, 393 bp, Emericella nidulans
gcgaacggtttcgcgtactggcagggccaagacatcgacaatgccactgctacctacttcgatgacatggcacaagccaaggcccacatcgagaaggttgccggcgacaatgcgaagaaaatccgatttggcaacggcgagagcggctggcctaccgatggcggatctgactacggcgctgccaaggccagcaccaagttcgctgaaaaatactacaagaatgccgtctgcgccatgctcacctggggcatcgatgttttctacttcgaggcctttgacgagacctggaagcccgacaccaagggcgacaacggcgagctcaaggacgagaaacactggggtctctttaccgatgatcgcaaggccaagttcgatttgtcgtgcccgaactag

SEQ ID NO: 27779 - DNA, 465 bp, Emericella nidulans
acacgcctgaagactgggctaacgcacagacgacagcgacggaacgaccagcagcgaacactcagaggcaccaggcaaaagactccacggacggaggtacatggagataccccgaccgggaatgacgggcagcaagcgaaacgacgctatcacacatcgagcgaaccgaccgctcaagccacgggcacacgacagacccacacccacacgccgggcgggtccccgcaaggagggcaactcgccatcgcgggcttcaacgggcatggactgccacagacactactctccgcaaagggaacgcagcagatgatgcacaacggagtcgagctcgaagagacgggcaccccgaccgtcttcaagacgacacaggctcgaccggacagcacgcagaacagcattctgcgtgcctctcacctcaagcaaacgaggacagacgtcagagggccggatgtagacgagaagtga

SEQ ID NO: 27780 - DNA, 402 bp, Emericella nidulans
gcctctcgtcggggcgttgggctcggcgccttcgcgaaccgtacccaagccacgcaatcttatgccaaccatggcgcaaatctacggtctacacacacttcctcgctgcagacccagctctccgtattccagaccctccttcacaacttcgcgctagaacatagctcaacaatcaaatcaaatcctaccttccgcgcggagtttgctcgtatgtgcaatgccatcggcgtctacccgctcgcagctagcaacgtcaaaggcaagaacggacgcaaggccttgggtgacggctccagcttttggacacagattatgggcggtgacatgaatgacttctattttgaggttgctgttcgggttgtcgagctttgccgcaagactcgaaaggagaacaggggctag

SEQ ID NO: 27781 - DNA, 1662 bp, Emericella nidulans
gatgaggagacggcaaaacatagagaggagctagaggcaatccgggagcaaggcaaaacgctggctacggaaaatgcgtttctcaaacaggatcttgcggaagaagtttcacgagttcaccagataagagccaaaatgcgaacagaggagaaatcagcacccgtgacaccaaagaagcccaaggctctaccgtttcgcgacgggttcgacgacgaagaaatactggcggtctcgcctagcaagtcgggaagatcaaaacaagcaacacctaccgtgactggtaaaaagagaagacggacaagccagggtagcccgtcacgtttgcatctgagcccgcacagagagcaaaatctagggatcgcggggggtgcggtggatgaggccctgtcagagtctgcaatcgacttgcctatgaaggagtcctcgcaggaggccgggcaccaagatacgcacatcataaaacagatcctaaatcatcggacggtccctcataaaaccgacattgaaatcatagctgagctggcctttccttcggaacctgggcggacattgtacagcatcctcttggaagagacaacgcaacttgacctcggtagctacgcgatggaacacatgcgggcaataatttcgttatggtcccgagcacttaaagagaagttctacaagccgataccaatcttgttggaaaccacaaggctcatactcgccattgacgcgacggccgtcttacgccagatcgatcgtttgatacctgtgctgctggatacgagcgacatcaacggggtcccacgtttcaaacattcaccctatgcaagtcagagcttcggcaaagtgacacaaacaccggcttcccagcttgaacccctgagcgatgaccagcttgtggaggatctgtggcgccatatacgctactcttttgtgctgatgatgctaagttgttcgcagcctgccagcgacatcaagctgaccttaagtctgctcatgaccagtgtccgtcccaactcgtttgcatccattcaagagtccgaacaagaccagaagtcgaacgagaactgggttgtcgaccgcgtcgctagtctcatgtgggaaacgctacaaccagacgagggccagccgccgtacacgcgagcggagatttgtgacgtgcggctggaagcgttagccttcttgatgacggtgaccttcaatcctattgagccgaataacacgcacggcagcctcgttatcgcctcgcatcatacggccttggcaaagttggttagggcgatgcacgacgagttggatgcactctattcatatccaccggaaagagatatgcactccgccatggtcaacggcctcatgcgattgatctacagtattatacaacgccatccaaaggaagctgacttacagttaaagctgcatcgagtacccggcggaaagcagaaatttctcgtggtgttgacgcggcttgccttcagcgaaggaattgttctcgaggcaggcatcgaggacgagacagtggaaatggcgcactcgattctggacgatgcggtcaatccgcaggaagcagaagctttacttgaggcattcccgcatgccaagggggaggatacagaggcgaagaatgcagaagatacggagatgatggaagtgatggaagaggatttggcgttatag

SEQ ID NO: 27782 - DNA, 312 bp, Emericella nidulans
cctggcttgttcatcgacgacacctactacgccgtcggtgccgccgttgcacacatcgatgctaggacctgggtgcttcctcctgtattctcatggctcaaaaagcagggcaacgtctccgctcatgagatgacccgcgccttcaactgcggtgttggcatggttattgtcgtcgaaaaaggctctgagggtgccgttaaggatattctcgagaaagaaggcgagactgtgtaccaggttggtgagctcaaggtcaaggttgagggcgaagaggaatgcattgtttcgggtcttgagacatgggacgcttag

SEQ ID NO: 27783 - DNA, 249 bp, Emericella nidulans
aaactggccaacttccgtgtggcgtccgtgcccggactgaccctgcctgcgcttaccggtggtgctattgggcacgtggggtacgactgcgttaaatactttgagcccaacactgcgcgtacgcttaaggatatcctcggcattccggagtcggtattgatgcttgtcaacaccattgcggccctcgatcatttgtaccaggtctggcaagtcgtcacagacatcccaattaccgttatcgacgcgtga

SEQ ID NO: 27784 - DNA, 399 bp, Emericella nidulans
ttagggttgacggaagcggaaagctgcccggagacagcaggcacgtcgcaaaacatcggcaccggctccagcagggggaggggggccccagccagcgccgccatcacggataagatcgccaagccccgcggcagggtggaccgcgcaaacgcagcgagagagaacagcggcgtctgccgaaccgcatctgaggcgggcccggccggggcaaactcgggaaaggcgacgcagatgagaggcgtctcggcgcggtcacgggcaagcgaaccggaagcggagtacaagcggcacagcacggcgagacggcggcacagcgcggcagccacaaacggcgcggcgcagggcggaaagcacgcggcggagtgggacgcctgcacgaaccccagcaggcaccggtag

SEQ ID NO: 27785 - DNA, 1680 bp, Emericella nidulans
ttcgcaacagagagaatcaccgcatccctcgccgggcttctgcaggagaaggattcgcaagaaaacagcggaaggctaggcccggcgtcttcgcggtacatagtggaagagcatgacggctcacggaggcggagggatgtggagattgatgaattagagatacaaaagggactgctccagaccgcaaaggggatagagttccttcacgagtccgccggcttagttcatggcaacctcaacccagaggccattttcatcaacgccaaatctgactggaaaatatctggcctgggcttcgccggtccagcggacacatccaactccaagtcaactctacctcctttagctctgtcggaagttctttaccaagacccacgccttccaccatctgttcaactgaatctggattacacttcccctgactttgctttggattccaacgttaacccctccgccgaccttttctcccttggacttataattatagccctctataactcgcctcatgcttctccattaaagtcccacggtagtctggacgcgtacaagcgactgctcacatcgccgtcaacgactccctctcaaagcaacaactttctttgttccggctcgataccgaaggacattcttacgcatgttctgccaaggttaataactagacgacccgcgcagcgtcttactgctcgagagtttcagcagtctcaatattttgacaatatacttgtatcaactattcggttcctggaatcactgccagccaagaacccaaatgaaaaggcccagtttatgcgtggcttgcaacgggtgctacctgagtttcctgtttccgtcatggagaaaaagcttctgggggctctattagacgaacttaaagaccgtgaactcctctcactcatcctgcaaaatgtctttgcaattctgaagcgcattcccaatgcgcgtcgtgcactccctgaaaaagtgattccgcaactcaaagagatctttccggcaggaaaaggcgcttcccaggagcgggattcgaaaaaagatgcggggcttatggtagttctcgagaatatgactgttattgctgaaaattgtcctggcaaggagttcaaggacgatatcctacctctgatccgcttaggatttgattcgcctactcataccctagttgatgctgctatcaggtgcctgcccgtgatcctccccgtactcgattttagcactgtgaagaacgaggttttccctccgattgcatctactttcagccgcacgaacagtcttgccgtcaaagtacgctgtctgcaagcattcactgtgctttgtggtggctccgtggataataaggatgataccagtgatgacttgtccggcattgtcgaaatgaacaaaccacaacatacgaaatcgtctattctagacaagtacactattcaagagaagctcgttccgtccttgaaagcaatcaaaacgaaagaaccggctgttatgatggcggctctaggcgtcttccagcaggtccagaaagttgcggattctgattttctcgcccttgaagttctccctgtcctctggagtttcagtcttggaccgcttctaaacttgagccagtttagccaattcatggctttaatcaagagcatttcctcaaaggttgagcgcgaacaaatgagaaaacttcaagaattgctttag

SEQ ID NO: 27786 - DNA, 375 bp, Emericella nidulans
atgtccaccaccttcttcgtttccatgctcgccctcgccggcaatgccttcgcttctcctgccctccaggcccgcgacggcgtccagtgcggtggtgtcaactacgctcccatcggcgacgtcaagaactgcatcaactacctcaagagcaagggcactgatagctgcaaagtcggcgatggcaacggtggtttctgccgggacggagctgcggtgatcctcggcagcggaaccactgaaaccccttgccaaaacgttgccgctgctgctgaggcaatccttggaagctgcaccaatgccgaccaatacgttggaggttcctccaccatcggtggtaacagccacgttgttgtcactgttaggcacgacaactaa

SEQ ID NO: 27787 - DNA, 414 bp, Emericella nidulans
gtgcagcgctcgtccacctgcgtcatctcatcagacgcgattgtgaatatcggattgaagggtctctatgaggagaacgggcccccggtgcacgactctgacgtttttctctacagtatccccagcgagcaattcaaagcacagcaggtcagaattacggcggtgcagaacgagcatgacaaagtgcttcttgaaggtcttgagaaggctggattcaaagtcgacaagggccctgatgacgccgggctgcttatgaagaactggcagcggggcggaggatacacaattcaagttggcgctggaagactcatatcggacgggaagatcaaagtcaagccgggagaagagattgcaaagatccctccgcaggacttcagtttcctgacggctctgagttggaagccgatgaaatag

SEQ ID NO: 27788 - DNA, 1452 bp, Emericella nidulans
cttgcttacgatactgccaatgaggcttcaagatatcaacccttttcctcaagcatcggtatcagcgacctcccatcggcccatccagccaaaatctttggcaggaaagggagcagcaccccgtatcccaatgtttattcacgaagtggatatgatatgatgggcatcttggccgaggtggtatcgagagataatcctaggattgaccttggcccggttgatctctcatgtgcctttgtactctgtgacctcacaatggaggacagtcctattgtttacgtatcccatgcctttgagcggctaacagggtacaatgagaaggaaattgttgggcgcaattgtcgcttccttcagagtcctgacgccaaggtggaaaaaggggagccccggaaatttgtcgactctcatacagtcagccgtttacgcagtgcggtcgatcgacgttctgaaattcaagtaagcatcatcaattaccgaaaaggagggcagccattcttgaacctggtgacgatgatcccggtgcgctggaacgctaaagattactaccttgccaacgttgagagcggcgggctggccgagaacgacatctgggcgaagttatccttgtcagggatcatcctcttcatgtcctcaaaatctcgcgcagtcctcggccaaccgtccgacgacctcatagggaagcgtttacaagactttcttgtgaccgacaacttccactcggaaccggctgtccagcaagcgcttgaaacatcccgtcataatcaacaagctactttcacccacagaatccgccaccggaagggccatatcatttctgcccagatcactctatatccgggagacatagtatatggcgcttccaagcccgccttcttgatcgcacacctccgctttccaagggaactccaactacaagcatcaaccactgaagaccaaagcaatagccagagtcagagtcagacctcaagtgacaccggccctggagactacaagacaccccagaatcagcaacagacagccgaatcccatcaaaaaccgcacccgaacttcccgcaaccccccacttcctccgcaaccctagccgtgccgtcatcagcctcacccaactccgccgagccgcccactgaactcggcatgcacctcttcgaagaactcaacccaactcgcggctcaaactggcactttgagctgcgcgagctcgaaaagcagaataggcatttgaccgatgaagcgcagcgtcttcttgcccggagacgaaagcggaagaggaaacaaagcgctgctgctatggagaagagctgtgctatgtgtgggacacggacgacacctgagtggcggaggggtccgagtgggaatcgggacctatgtaatagctgtgggttgaggtgggcgaagcaggtgagaagtgcggccgcagtgcatagtcaggcaaagtctggcggtgagggttga

SEQ ID NO: 27789 - DNA, 1083 bp, Emericella nidulans
aaggttctggtctgcccatctggcttcaagggaagcattaaccctggcacagcggcggactgtattgaggccggcatcctgcaagccatgcctcaggcaactgtccacaaagttcccctcgccgacggtggagaagggtttgctcatgccctggtggctgctacgtcgggggcaatacgcaatcttcgcgtaaccggccccgttagagagcccgttcaatcattctatgggatcctcggcaacaccccggtcaagactgctgtgattgagatggcagccgtggccggtctgagcttggtccctcctgaccgccgcaacccctgcgcgacgactacttatggcgttggccagctgattgccgcggcgcttgatgacggggcccaacggatcatcgtcggtgcggtgggtgccggaatgctccaagccctcggggctcgactactcgactacgatgggcgagagcttccgcaggcaggtggcggccagtcactcgtttccctcgccggagttgatttttcaaagatgcatccccggttgaaatatgttaatattgaggccgtctgtaactggaagaacgtcctctgcgggccacagggagtagcgcgagtctacggcccgcaaaagggcgcatctgccgaacaaacacagcttctagaagcagcactgcaaatctatgccgtcgtcattcatcgcacgcttgggatcgacatctccaatgcacctgggagcggtgcatccgggggtctaggggcaggcttgctcctcgttggagcggagttacgcccacggtatgaggccttgatggagtatttccaccttagagacatttttagtgactgcgacctggtcatcacggcagagggggcgatcgatgaccagaccccaaggggcaagatcccggcagaggtcgcactgcgtgctagagagcgcaacattccggtcatcgtccttgcaggtacggtcggccgaaacgcccaggtgaactatgagattgggattagtgcgctcatatcgatcttacagcggccctcgaccctggacgaagcgatggggacactgacggctcctgaccgaggcggctga

SEQ ID NO: 27790 - DNA, 339 bp, Emericella nidulans
ccaaatccgccatccacacttcccgtccgcatcctcggctttcttcatccagatatcccaccaccttctccacgcaccgaaaacgaccttgctgccgcacgtcaagcagctgcagatgcagctgcactggcggagcagtacgacacagagtacgtgcaggcgcttctggatcatcccctgtggggtcccgaggcggcagatcgtcgcggctggtttgatcggaccaaggacggggcgggaaatgttcttgcgcgagggcaaaagatgattgagcgagttggagtgaggactggcgttgaacgagagggcatgggcgggtattatattgtgaggggctga

SEQ ID NO: 27791 - DNA, 423 bp, Emericella nidulans
gtagccccaggttcgtccctgctcctcttatttcatacacggtctcttttaagccgcagcttcaacacatcaaagttagcctactatccagcaccagagaacaacggcctcggtgtcgccgtgctcgtcctccccggcggtggctactcgtacgtctcactcgaccgagagggcaccaactcgaccacttacctcaacgcaaagggctacgatgcctgggtgctagactactctacggccgaaacagcggcaacaccactttacccagtaccactagaagaagccctcggcgctgtccgctacatacgcagccagaagcgagtcaaggttgacaaactcggtatctggggttactcggctggaggccacctcgcagcggtcactgtgacaaacccagaagctgatcttgatttcggcatttaa

SEQ ID NO: 27792 - DNA, 579 bp, Emericella nidulans
gcatctccctacgttgtccttgtcacgggcggcaataatggcatcggatacgaagcctgcaaggctttctacgagtctccgaagtcctacatcatcctcatgggctcccgctccctcgagaaaggcgaagcggccataaggaaaatcaaggaggtggtcccaaacagctcaaatactctcgagctcattcagctcgacgtcaccagcgacgagtctatccagaaagcgtacgagcagattctcaaaagcccggggcgtttagatgcgcttgttaacaacgccggtatatacttccctctatcgacaaaaggagcaacctttgatttcgactacaatgccagcaaagttaccctccgcgagtgctttaacaaagcctacgacgttaacgtaaccggtgccacagtcctaacacacacgctcgccccgctcctcatcaaatcctctgacccccgcctcctcttcatagccggtctttccatgatgaccgtcgcaatgaaggagtacttcccgacgcctccgctgccagcgggctggccgaagaaggtcgaattcgagacaatcggggtaccggtgctctaa

SEQ ID NO: 27793 - DNA, 363 bp, Emericella nidulans
aatgagattctcgagggcccagaaaacgacttcgtcacggacccaatgaacgacaatctttggaagacgtggacagaccaggccactgttaacactaacatctaccggcagctcttccgcaccgatcccgacgacaatattaggacctttgaggagtatgacaagtaccgcgccaaagatggctacaaattaggccatttgtacgatccgttcataccagtccaggaagtccgggagaagctcgataagatcaagggacacctcgtttggatgccattggatttcctgaaggatgctgaaatggcggagcctgaactacaggtgaatcagtatacggaagtaagttctgcactcgtcgactag

SEQ ID NO: 27794 - DNA, 1194 bp, Emericella nidulans
attggcgaagagaaaaccgatggggccctcttccaagccgttaactgctactcatctacgaatctagtcgaatggacatttgtgaaccaactgctcactgtcacggaagaagagggcgcagacctcggcccaaatcgcattgttgaacggcctaaggtcattaagaacgacaatacaggccaatatgtcatgtggatgcatattgattcaacggattatgcggatgcaagagtcggcattgccacggggaatagtgtttgcgaagactatgtgtatagggagagttttcggccgttgggtttccaaagccgagatattgggctattcaaagatgaggatggctcagcttacttgcttagcgaggatgtggatgactacctccatgtcgcgaatgtgacctttggctgggagtactttgctgaatctccggcccttatcaaacgcggcgagacatatttcatttttggatctcatctgacgggatggtcgcctaatgacaatatctattccactgcgacttctctctctggaccatggacggactggaccgaagtcgcccccgtcggctcaaacaccttctctagtcaggttaattacgtcttacctctaggcacggacaaggcaatttacatgggtgatcgatgggtctcatcgaatctaggcgcgagtacttacatctggcttccattacagattgacgggacaacggccaccgcgagtctgacgtggtatgattcgtggagtgtggatcgtgcctctggcacttggaatgcagaggaagacgagacggtgtatgaaggcgaagacggggccctttccggcggtgcccggctcatcgactgctcccggtgcagtggctcgactgcagcagggtatatcggcggtgctggggacggcgagaatgacggtgctgttacccttcaggtcgactacgcgacacagagtacggactcggcgcgtataactctaaacatccattatctaaacggcgatacagacccccgttatgccgctgtgtctgtcaatggtggcgaggcgcagacgatagcttttttatcaactaaccagctttctggtagcggtagcagtgctgtacatgttgacttggtccagggcgttaatactgtccaaatatcgggcgtggaaggaggagggtggggaccggatattgatcaggtggcagtgcccttgtaa

SEQ ID NO: 27795 - DNA, 312 bp, Emericella nidulans
gcgtcgacatcctcatctcagtcgtatcggctccaggcccaatacacctcgcctcagctgaaccgcacgttcgagcacaccatcaactcacccgcaccaagcccctcagaggaaaacataaaagtcaaagtcacctatctctcggagcttcgaaaactggttcccgcgctacagaatgacatcaatttgtttttgaccgaacgtatggaggtggacaagaaaacagctgaagcccagggccgccaattgtcagagaatgaagccaaggaggaagagaactacggagaggaagtggttgatgacgatgcatga

SEQ ID NO: 27796 - DNA, 444 bp, Emericella nidulans
acagatagcacaagtccgcctccgagctacatcagtaatgcgtcagcaaaccccatgaacggcgatgcaactggagcagaatggtcctccgccgttggtcacgcagctacgggcaagtccggtcgtgtcatacacaatttacaagaggatatcgcgcggttgactcgcgaatgcagcgtttaccggtctcgcgcagaggaaacgcagcggatgaacgaagccttcaaaactcaagtacaaaacatgaccgatcgtctccggaaccttgaacactcgaacgaaatgaacctacattcactctcgcggaaagaaaaaaagattgaggaactgcgcgctgagctgaagggcgaacgggacaggcggcagcaagcggatgacgagaaagccagattccgccaattgatggatgaagcgcaggacgggtttccatcaaaaatgtgctga

SEQ ID NO: 27797 - DNA, 1086 bp, Emericella nidulans
ctggctgcccgtcaacgaaaaatccaacaacaatacgcaaacctccaccacccgcccagtctccaggacatctggatctgtgaattctgcgagtacgagagcatatttgggcgacctcccgaggctctcattcggcagtacgagataaaagatcgtaaagaacgcaagcggctggcggagaaaaagagacttctggagaaggcgaagatgaagggtcgcaagcataagaaggcacccaaaaatgcaacaaagcatacggctgctcagcatgcagcgtatgatcatggctatgaccgggtctctgtcgatcattcttcggtaggagaaggaccgcaccacgatgactggggacatgaatacgacaatgaagcgacaaccgctggcccaccggctacccctgaagggactttcaaatcaccgcttcccccgggaagcgcggccaagaagcccactgcggcgcctttgggcgtcgaagaatcttgccttgggtcaatcattggttggaatgtctccgggtgtttggtgaagatgttgcagttagagcctggtctcatgctaagcttgctgttggcgcgcgcgaaacacgacaatgaggtgtttcaggacgacacctggacagggaatcagtggttgtcagtctctcctgtgttactgccaacaactcctgcaactgctcttcttctcatctctgccatttttgaaccctctcacttcaatctaatgtggttcgtcctctttaaaatcttccgcttcggttactccgagaccaaaaaatacaaagccaaaaaagccgctcaacagaatcccggcgtcggccagaacccgcaattccaacaaccaccgttgccgaacccctacatcggcggttatacgaacggccctcacgatcctggagctggaccagaacaatacccaatggacacctatccagcccctccgctccccgggcagaccccggcaccggctatgagcaagcgcgccaaaatcaaagcgctactctcaacagccctcgcagtcgtccaattcgcattcggccttgccgtcattgggcctgatagtcaggacattaacaccgcgcgggattaa

SEQ ID NO: 27798 - DNA, 789 bp, Emericella nidulans
ccctacctcgcgaatccctctctccaggtcaccgccgaccaccagatcaagctcgtcgaagcccctgttcacgagccgggcaagggcgaggtcctcgttcatatcaaagcgacgggagtctgcggctcagacattcatttctggaaaaccggtcgcatcggcgagctgatcttccacggcgactgcatcatcggccatgaagcggcgggcgttgtcctgaaatgcggagagggtgtcacagatctgcaaccaggcgaccgcgtcgccatcgaaccaggcgtcccctgcgaaaactgcttcctttgcgacgagggacggtacaatctctgtgaggacgtcgcattcgccggggtctacccttatgcaggcacaatccaacgctacaaagtccacccggccaaatggctacataaactcccccctagcctgtcctacctcgacggcgccctcctcgaacccctcagtgtcgtcatgcgcggtattcaagttgcgcaactcgaactcggccgcggcgtcacataccagaacaatccgacactcgacgcacaagggaacgccaaagcaatccgcgcgttatttggagacaacgagtacaatgccccagaccgggtcctcgaatgcaccggcgtcgaaagcagcatctgcacagcggcgtacacggctcggagaggcggtcttgttgttgtcgttggtgtcggcaaggaaatcatcaacaatgtcccgtttatgcatctgtccctcgcagagatcgatctctctaaagctttggtacacactggcgcaccttga

SEQ ID NO: 27799 - DNA, 348 bp, Emericella nidulans
cgcctgctccctctcgttgccgcagcgacagctgcatttctggccgttgcctgcagttctcgctacgccgcgcgtggcgtgaccgtagtaaataatttcgacgccaaacgttatctcggtacctggtatgagattgcccgttttgatcaccgctttgaacgtggactggaaaaagtcaccgcaacatacagcctgcgtgatgacggcggcctgaatgtcattaataaaggctataaccctgacagaggaatgtggcagcagagtgaagagaaagcgtactttaccggcgcacctaagctcgcgtgcgctgaaagtgtcattctttggtcctttctatggcggttataa

SEQ ID NO: 27800 - DNA, 1059 bp, Emericella nidulans
gctagaatcgacgcctcgaaatcagcatctactcaacctgaagcctccgtttccccagattccggcattgcaagtgaggttgaaacgacaccgcagccccaagagttagacagcacgtattctatagtcatcctttgcccgttgaagaacactcgcaaagcaattacacagcatatcgagcaagtggttccgcatgaaatacaacactcaatcatatcgtttattgatgtcgaggactggaaggactcagcagactttgattctggttctcgtattactcacttagtcctcaatctgcctaatgttgatgaggttctggaggtgattaattatgttgcggctcgcgaactacatatggcacctactcttgttatcatatccgacctctatcagaagcgggaagtcaacgcacatatcaagcagctttctgccagcggaaagcgcgtcttcaccgttccgaagcctgtcaaaccctctgcgttttcgccgatattcgatcctggcaacaggagagatctcagcaaggataggaaccaagatatggctcgtgcaattaacaataactttaagaccatgtctaagatggtgaaagaagtaatcgggaacaagggttaccgggtgttgctcgttgaagacgatgaaacgaaccgcatggttatgatgaagtatctcgacaagatcaaggtcatggcggaaaccgccggcgatgggcagcagtgcacagacatggtattctctaaagaaccaggatactactctctaattatctgcgatattcaaatgcccattaagaacggttacgaaacttgccgcgagattcgcaagtgggaaatgaagaatcattacccccagataccaatcatggccctttcggcaaatgcgatgacggaccaaattgaagacgccgcacgcgccggcttcaatgactatgttacaaaaccaatcaagcacaacgagctagggaagatgatgatgggccttctcgatcccggacgcccgctgcttctcctccgcgatcggcttaaggaaggaagtgaggaaagacatcgcactggttaa

SEQ ID NO: 27801 - DNA, 1302 bp, Emericella nidulans
ctcaagccgtttctgataagggaccttcacgaggatccttattcacagaatattattgaagacaccgcgtctgatttgtacaatgccaccgatgcgggcgtcagccctcagcggccacacgggcttgtccagataaccagagccgattacgacgaaatcgcctatttacatccgcaggcccgcctgtcttatctagacgatgatgatggggatatcatcacggtcgggtcctctcttgagctcgctcaacggcttgaagagccggcttcccacagcacagacaccggtttcccatcgactatacatctattcgatattagacgaacaaagtccgttatagatatctggaggcggtatgaacataatgagcgccagtcggttccagggtcgccaaatacggaagttgtaatagccgatttgaatggcaatcggactacggcagatctcgaggaactcgattccagtcgcgaacagaagtcgcatgttgaggatgagcgaacgaccacgactgaaaacgaatcatctgagtcgttcctttccgcattcgaggcagagatggccagaatgatgaatgaatcacagcgtccagaaaaccacgcctccgggagcacaacatcttccagggcggcacaaaccgaatcaacctctaacccacaacgcgagacggctgacgcttttgcttccgccctgcggagtctcatggaagttgcggagctcatcaaatctggcgtgagatccaaacttcctgagcttgagagacatttggacaatgctcgcagagcgcttccaaacgacattacagactctatgcggagtgctttcctggctttcgaggagcaggtcaaggcgatggtggccacccttaacaatctgccagagacggtcaggcgagacaacgcacctggaagcgctagccttttttcggagttccctacaactcagagcgccatgaacagcctgcgtgaactcagcgtacagtttggcggcttggggcagactttgattgacgctttcgaatcaagtatccgaggcgctttcccgggccatgcggatagcttcttctctagcttccccagcttctccgagtcagcgaaccaacgatcgagctcaccgaacaatggcccagaaaatccctcaagtcaccatgagaaccctgtttttaggcagacatcaaacaacccggccgctttcccttctcatcagacaaatgcgccgaatgcaccaggttcagtgccaccccctgcgtcttaccaccctttatgggattctcctcagtttccatatatccctccgtttcactga

SEQ ID NO: 27802 - DNA, 1752 bp, Emericella nidulans
tggaccgatatcgactacatggatcaccgcaaagtttttacactcgatcgagagcgattcccattggatactgtccgagctttggtgcaatatcttcaccagcgagaccaacattatattgttatggttgatcccgcggtagctcactctgagaacggcgctttcacacgagggctagagaaggatgtgttcatgcggaacgaagatggaacgctatatcaaggcgctgtctggcccggtgcgacagtttttcccgactggttccatccaaacacttcagactattggatcaacgaattcgcgttgttcttcaatgcagaatcaggagttgacatcgatgccctgtggatcgacatgaacgaggccgctaacttttgtgactggccctgtacagaccctgtcgcctatgcggaggagaataacctccctccggagccgccagctgtcaggccaaatccgagcagccttccagggtttccggctgagtttcagcctgtaaacagcaataacaataacagtagcagaaaacgcgagacgcaagttgttattgcagccaggcaaggatttgtcaaagtcggaaacgacaatggcaatggcaggaggctgggtctgcagggccgcgaactgatcgatccgccctacaagatcgccaacgcagctgggtcgctgagcaataagactatgaatacagacattttccatgccaatgggcttgctgagtatgatactcacaatctatacgggacaatgatgagttcgctttcacgagacgccatgctctacagacgcccagagaaacggcccctagtgataacgcgcagcacctttgccggtgcaggctcctacgtcggtcactggctcggcgacaacgctagcacctggaccaaataccgcatctccatcgcccaaatgctcgccttcgcatccatattccagatccccatggtcggttctgacgcatgtggttttacaggcaatacgactgaggagctgtgctcgcgctgggcaaccctggccgcttttaaccccttctttcgcaatcacaatgagtacgggatggtctcacaagagttttacaggtggaactctgttgccgaggcagcaaggaaggcaataagcatccgatacagtttgcttgactatctttacacggagttccatgaacagacggtcacgggcgagccgtttttgctcccacttttctttgtctatccaaatgaccccaatgtggtgggtattgactcacagttcttctatggggatgcgattcttgtcagtcctgttattgaagaaggtaagacggaggttcatgcttatttcccgggtgatttgttctatgattggtacacaggtcttcctcttcgtggaaatggtgaggtgataacattgacggacattgggtacactgacatcccgttacatgtacgtggtgggaaaattgtgcctgtacggaccgggtctgcggggatgaatacgacgactgaggtgaggaagagcgggtttcggttggtcattgccccaggactcgatggtagggctgcaggccgcctgtacattgatgatggggaatcgttggagcagactgccatggtggatgtggtctttacctatgaggacggtagggtgagcgttgatggcgtgtttacgctacagactgatctacgtgttgaggctgtgactgtgttcggggacaatgtggtcgaaaggactatcgacctgcctctttccggaccgggaggtgttgagctgtag

SEQ ID NO: 27803 - DNA, 1317 bp, Emericella nidulans
gcctattacaccattgcccatattttgcgcggtgacggttacggtaagtcgacaggtaagctcaacatcaaggcagagcaaatgatcgacgaggtttgggactatgtgttctgccgacgtgagatcagcgatgagctcatctcgaagagcggtcttagcaaggacgctctccaggctatgcgaagagaattcgaatactggtatcccatggacgtccgagtgtctggaaaggatctcattcagaaccacttgaccttcttcctttatatccacgtagctctcttcccaccgcaatactggcctcgcggtatgagcaagagcaccggaaacttcttgaccctgaaagactccgttgacaaattcggtgctgatgctactcgcattgccttcgccgacgccggtgatggaatcgaagacgccaactttgaggagagcgttgccaacagcaacattcttcgtctctttactttgaaggagtggattgaggaggttgtcaaggatgagagtttgcgaacaggacccgcagaccacttctgggacaaggttttcgacaacgagataaacaccctggttcgtgaaggcaagaagaactaccaagacaccaacttcaagctcgctcttaagtccagtctgtatgacttggttggtgcccgtgatgcctaccgtgaggcttgcatctccgcaggcatcggcatgcaccgcgatgtggtcttgcgctatatcgagctccaggcgctcatgatgtcccccattgcacctcactggtcagagtacatctggctcgaaattctgaagaagcccgatactatccatcgcgctctattccctgaggttgcagagccctcacctgaactctcagcagctaccagctatgttcgcgcgaccgcctccagcatcctgtccgccgaagccaacttcgtcaaaaagctcgccaagggcaagtctgcacacttcgaccctcgcaagcccaagaagattaccatctttgctgcgaagaagttcccttcatggcaggagaagtacatcgaccttgtccgtgaagcctttgacgctgtctccctcaccattaacgacaaggagctaaacgccaaggtcggcaagcttgaaggccatgcctttgttcagggtctcaagaagcgtctgatcagcaccaaggaggctcccgagatcgtctttgagcgaaaactaccgtttgacgagttcggtgtcctcaaggagatgacggttaacctgaagaagaccacaggagccaaggagattgagattgttgctgttgatgagggtggcaagaccgggggagttctgggctccggttga

SEQ ID NO: 27804 - DNA, 258 bp, Emericella nidulans
ggtctgatctacgacgctatgggctatgataacccagtcaccagcctgatgttcgacacgaagcggattgttgctgcagctggagagcacgtcgtcaacgtgtacgacaaagcagatggccaccactgggactgtggtgctggggtcggagccgacgaaacaggacctgaccctacgatcgttgagcgtgtccgactcaaggacggattccttattgaagccgacagggacggcattgttgcggcctggacttgttaa

SEQ ID NO: 27805 - DNA, 423 bp, Emericella nidulans
gactcctcactcacaaaccccacccccagcaaagcccaaatcgcccagtggacgctcggtcaactcgtgtccgactccctcaatccctccgtgacagccgcagaggccgaagagtacgagcgctacatcaaccacccgcttaaagtcccactggtcgtgacgtctgaggatgaactaaccgctgcatcaatacgtgagcacgaagctaatctggatctggtcgaatacatgaataagtgcaacgtggaggaatatacccttagcgcgaacgctgaggagaatctagcggactacgcggaattcttgcatgtttccgaggaggggctcacagttgtcgaggcggataaggataagaagagatataagcggtatgggcagtggttgaaggggaagagccttttcaagcagagggtcgagacttag

SEQ ID NO: 27806 - DNA, 495 bp, Emericella nidulans
cgtctgcgtattgtcgacgaggacggcaaggatgtcgaggagggtaaagagggcgaattccttgtaaaaggacccgtggttaccaagggctattatgggaatccgcaagccaccaaggaagccttcaccgatgacggctggttcaagtctggagacattggtgtgcgccgcgacggactgttctatatcgttgatcgaaagaagctcgaagcccaccttatctcgcaccctctcatctacgatgcagccgtcattggtgtcccagcacctgacggctctgggaacgaagttccacgcgcatatatcgttgcggataaagcgaaaatcagcgaagaccaggtcaaggactttgtcaaaagccaccttgcacattacaagcagctccgcggtggcgtggtatatctgccagccatcccaaagagtccgagtggaaagatcttgcgccgcgaacttcgtgagctggtgaagaaggaggctggcggttccaagttgtaa

SEQ ID NO: 27807 - DNA, 525 bp, Emericella nidulans
ccgcaaaccaagccctacatcccgacctacgtcctaggcgtagggatgacgcagtttctcaagcctcgccgcatcagggaatacccagaactcggctacgaagcaggcataaaggcaatgcaagatgccaaaatcacttacgacgatgtcgaagccggcattgcttgctactgctacggggataccaccagcggccaacgtatattctaccagttcgggcagacctcgatccccatctacaacaccaacaatgcctgcgcaacgggctccgcgggtctgcacctggcacggacaatggtaaaaaatggaggcgcagactgcgttcttgtcattgggtttgagcagatgcgtcccgggtcgatcaagagcgtttgggatgacaggccgagttcggttggcccatcgacggcactgatggaaaagacgcacgggaagcacaacagtcctaggaatgcgcaatattttgcgaacgccggtgtggagtacatgaaaaagtataggaccgcatgtgtctcatcagtatag

SEQ ID NO: 27808 - DNA, 624 bp, Emericella nidulans
gcagaagaaggagaaaagggtcagtcatcagcatcagcgccaaccggcgcttctgttggagcagcaccagcaccagcaggaagcgaacgcggcgcaggtccagaatcatttaacgatgcaatccaacgaacgatcaaccggatgaaagaatccggcgacaaagcgactgccgccgcatcagaagataatgcagacgacctcattgcacagctcctcaaggccatggaagctggcggcgacgggtctggcggcgatgaaggcgacctgaccaaaatctttatgggtatgatggagcaactgtctaacaaagacatgctctacgagccgatgaaagaactggacacgaaattcgggccctggctgaaggaaaacaagggaaaggggaaagtttccgatgctgatatggagcggtacgaaaagcaggcccaactggtcggggaaattgtgaggaagttcgaggagccaagttatacggatgaggatccagggtgtcgcgagtatgtatgggagaagatgcaggctatgcaagcagctggaaatccaccagatgaacttgttgctaatccttggatggatgacctcaagaacggcggtggtggtatccccgattgtccgcagcaatga

SEQ ID NO: 27809 - DNA, 474 bp, Emericella nidulans
gctcaaccacaaaacgaccaagcgcagccaccaccggcgactctcaccaatcctcgattcacgctcgaacttgaattcgtatcctctctcgcaaacccgtactacctgtctcatcttgcagtgaattatccaagcctgctaggaatttccaaatctggtaacgagaacgaagtcaatgacgacaactcagacccggacgccgaggcgtttgcagcgtacctcgcctatctctactcttactggaagacgcccgaatactcgcaatttttgacacatcccggagcgaccctccgcgcgctacggcttctacaagaggaaaaatttcgtcgtgatatcatccgtccgcaggtgattgaaaggttggcgggcgtggacctcaacggcgagcagagcgctgcggaagcaggagaacagaatacggagcaaaacaaaggggacagaggaaatgttgagaatcaacatggaaagacctga

SEQ ID NO: 27810 - DNA, 327 bp, Emericella nidulans
gcttgggccgttgcgatttgcctcggctgggcagccgttctgagcatcaccttcccccggatgcttgctgcgcttacacctcagggtgccttcggattctatgccggcctcaacatcatcgcccttttcatgatcttcctctgggtccccgaaacaaaacagcgcaccctcgaagagttggactacatcttcgccgttcctactcgcactcacatgcgctaccagcttttccaggttctgccttggtggatcaagcgctacattttccgcaagaacgtccgtctcgaaccactctacagatttgaccacgtccaggaggctatctga

SEQ ID NO: 27811 - DNA, 705 bp, Emericella nidulans
cgcgacgcccagtacattgtactcgagactgcagttccagtccacgaggatgatggaagctggcaagtcaccaagtccggaagaaaattcagccacgattggggatatggcaaaatcgatgtatatagtctcgtgcaaaaagccaagacctgggagctggtgaaaccgcaagcgtggtatcactcaccgtggttgagagtacagcacgaggttccgcagggcgacaaaggtgtcgctgcgtcctgggaagtgaccgagcagatgatgaaagatgccaatctcgagaaactcgagcacgtcaccgtgaccatgaacgtgaatcacacacgccgtggtgatttgagcgtggaactgcgcagccctgaaggcatagtcagccacctcagcacaccaagaaagaatgataacgcagaggtcggatacattgactggacgttcatgacagttgctcactggggtgaatctggcgttggcacatggaccgttattgttaaagactctactgtcaatgacaacgtcggagaattcatcgattggcgactcaatctctggggtatggccgttgatggtgccaagcaaaagttgcaccctctaccggacgaacatgacgatgatcatagcattgaggatgctattgttgttaccactagcgttcagccagcaccaccgccaccgaagctccagttgaacctcacataccgttga

SEQ ID NO: 27812 - DNA, 618 bp, Emericella nidulans
gctgtacagctaaacaaaacagcagctatgctccgcactgccggtggacatgatgaccttgcaaacaatcttcaggatcgcagcacccggctgcgtagggcaatccaggagaacgctatagtcaatcaccctaaatttggtgatgtctatgcgttcgaggtggacgggtacggatcccacgtcttcatggatgacgcgaatgtgccttccctcctttctctcccggtccttggctaccttgataaagatgaccccgtataccagaacacgcgcaagatgatcctctccaaagacggaaatccgtattatctcaccggctctgcattccacggtattggtggtccgcacatcggccttgaaaacgcttggcccatgtcccttctgatccaagcacagacgtcagactcagatattgagataagggagtgtctgaaccttgtcaagaactcgagcctgcttggtcttgtgcatgagtctatcaatgtaaataacatcgtcgagtacacaaggccttggtttgcgtgggctaattccgtctttgcccaaacggtactcaaaatcgcggctgagcggccggcgattgttttcggagaaggggctgagccgtatattccctag

SEQ ID NO: 27813 - DNA, 993 bp, Emericella nidulans
ctcctctcactgctccccctcttcgcaggggtctctctcgctgccacataccaggcatacaacttctccgtccccatcgaccattttcataacgaaactcgctatgcgccgcactccaacggcacgttcaatttacgctactggttcgacagcacctactaccaaccgggcggccccgtcttcgttatgccgccggcgagacagatgctggccgaggcgtacaatgggctcggtgtgatcctcgagcaccggtactacggagagagctacccgtttcctggggcggacgtgacggtggatgatcttgccgactacgcctactttgcaaagcatgtcattttccctgggctggaggcgtacgatctgacggcgccgaacacgccgtggatcgcatatgggggatctgtcgtcgtctgcgtcacggccgccattatcgactactggaaatatttcgagccaatccggaactacgggcctcgagactgtatcgagtcgatccagaccctcaccgatcttatcgatcggatcctgatagaccatcccggcaacaggacactacatgcgcagctgcagtcggcatttggcgtgaacccggctatcgacaacagggatttcgtgaacatgctctcgacaccgctgggcagtttccagtctaggaactgggatcctagcgtcggaagctatgagttcagacactactgtgacaatatcaccagcactgagcctctgtaccccgcaaacaatgccactgctcttttaccgggcttagtaaaggcggccgggtacaatgcgtcgaatacgacgctgctctcttctttccgcaattctatcgggtatatcagttcttcttcgtcgtccgctgagtccgagtctgccgaagacgacaatgacaacgggacatcccttcccaaatcatcagggacaagctggaattaccaggtctgcacagaatggggctacttcatgcccggatccagcgttcccccaacataa

SEQ ID NO: 27814 - DNA, 450 bp, Emericella nidulans
tggactgttggaaacacgaatggaagattacagccagattgggacgaagacgaagacaatggtgacgagacggatggagaaaaggacgaggaaggtgaggaggaagaggaagaagagaaggatccctacgctatatccgacgactccgacgatgaggaccagatggccgccattcgtgcgaagattcttaattcaaaatcattccagaacccatccgtccctgataaagtgcaaccacaaagaattgagcgaccagataccggaccactagaggactcggatgcggtgtccggcacagacggaagtgacgacgaggcttttgataatatcattaatgccacgccagttactgatcgaacgggcattatagccgcctcaagacacaagtcgaaagacacgtttagcgcctcgttttcaagaactgtggtgaacgcgcctaagagggggtag

SEQ ID NO: 27815 - DNA, 219 bp, Emericella nidulans
tcttccaccaacaagtcctctccttttacctttgtcgacgcttcgtcgacctactctgcagcctggactttcaccgtcatgaaagagaaggaggaggccaagcacaagtggcagaacaagaacaagagcaacgccagcaacgccagcaacgccgactccaagaacaaggacgcagccctccattacgaggccatggctcattacctagctttccgataa

SEQ ID NO: 27816 - DNA, 705 bp, Emericella nidulans
gaccgttctaactgtgataaccacagcaccttctctccggaaggtcgtttgttccaagttgaatactcgctcgaagctatcaagcttggttcaaccgctatcggtgtagcaacatccgaaggtgtcatcttaggtgtcgagaagcgcgtcacatccaccctgctcgaggcgtcctcagttgagaagattgtggaaattgaccagcacatcggatatgcccggtctttagttgagcatgcccgcgttgaaacccagaatcatgccttccactacgcggaacctctgcgtgtcgagagctgtacccaggcgatctgtgacttggccctacgattcggagagactggagatgatgaggagagtgtcatgagcagacctttcggcgtcgctcttctaattgctgggattgacgaggatggtcctcagctatatcacgctgaaccttccggtacgttctaccgttatgatgcgaaggccatcgggtccggaagtgagggggcacaggcagaactgcaaaatgaataccatcgctcgttgacacttgccgaggctgagacgctagttctgaaaacacttaagcaagtcatggaggagaagctagacgcgaagaacgttcagctggcgagcgtcaccaaggagaagggtttccgtatctacaacgacgaggagatgggacgcgctgtcgcgcagctaggtgggaatcaatga

SEQ ID NO: 27817 - DNA, 429 bp, Emericella nidulans
caaggtggcgccttgggtcccatgggattcacttctccccaaaacaacggatttttgactgcatacgatccgaacaacccgctcattggcaatggcttgggcgcacttggcatgggtcaatttgggctgagtggtcatgagggctatctttccgaccactctgagatcaaccgaggtcgttctcctcgtggccgtcgtggcagttcgaagccaccagaggaccccaccgacccgaatcttctcaaggatattcccagctggctgcgttccttgcggttgcacaagtacacggataacctgaaagacctgaaatggaccgagctgattgagctcaacgacaagcagctagaagagcgcggtgtcaatgcgctcggcgccaggaacaagatgctcaaggtttttgagcaagtcaaggaagccaaggcctga

SEQ ID NO: 27818 - DNA, 375 bp, Emericella nidulans
tctttcctcgcccgcgctactcgcacccctgcggccactcgcctctctactatcacacccacatcctcacgactccttagcacaacagccatccgctcgtcaggtcccattgatgccacaaaatccactctcaagaaagccgaccggaaggtggctgatgccgccgtgaagggaattgagactggcgaggccgccgcaaacaagatcaaggaagctgttggatctggtcaggcgcagaaggaagctaaggagaaggcgggcgaattgaagggagacgcggctgagttggcgggcaaggcaaagggaaagggtgaagaagttgccggggaggccaagggcaaggctaaagaggttgccggggagttcaagtcatga

SEQ ID NO: 27819 - DNA, 318 bp, Emericella nidulans
aacaaaatccgttcattggaagagccttatggtgtgttggttgtgaatgctggtgttatcctcaaggtcgctgaccagcacctggctgagcgacaccaccttttcccgcttgaccttggtgctaaaggctcgtgccacattggcggcaacgtagccgccaatgctgcaggacttcgcctgcttcgctatggcagtatccatggaaccgtgcttggtgtgaaacccgtgcctccggatgcaacaatcatgctcggcctgtcaacgctgagcaagagcaacacgggatccgctctggagcagttgctcagcgggtcttag

SEQ ID NO: 27820 - DNA, 675 bp, Emericella nidulans
gcaacgctttccaaacatcacctccaacccctgggccctatccatccccccagactcggcagtgcaagagcaaacgaagtcgacgcccaacccatcttcatcccagtccacgaccccctcgaccatgaagcccctgcgattctccactcaccccgcgactacgatgccgccgaagcccgcaactcagcggtaatcctcgtcagcggcgcaggaggaggcgtgagcggcccgtcagggatctaccccagtcttgccgataagctcgccatcctcctcggggtccatgtagtgcggctggactatcgagtcgccgcgcgcacagattactgcgtccctgacatcgcagctacaatggactatctccaggataatcacgggtccacccggttcgtcgtgagatgctcggagtcgttgtaccagcagtacggggacgacccgtctggctcccgtgagatcaagattttcaagggcgataaccatgggctgtcgaggaacgcgcccgaggcggagggcatgctactggtttttgcggcaaaggcactcgggctcgaagatgaattaacggctgcgtcggttaggattgcagcgcaggactgggtgggcagtgaaggggagcgcatgaaggagatggccgaggggcatgactttgaaggcggggaggctctaaatcgttga

SEQ ID NO: 27821 - DNA, 933 bp, Emericella nidulans
tgtattgagcctgtggagctgtggttggatctccgtgctttgcgccgtgggctcgtggtgccagtggaccctgatacagacccaacggcactcgcgttgcaggactcaggcatggtgccagtaaacacacagattgcaatagtcaacccggaaacttgcaccctctctcaagtcggagaatacggagagatctggattcagtcagatgcgtgtgccaaatcattctatggttcgaagcaagatttcgatctagagcgttttgatggccgaatcgaggatggagatcctaatgtgtctttcgtgcgcactggcgatctgggcttccttcacactgttacaaggcctattggacctggaggccagccggtcgagatgcaagtgctgttcgtacttggaggcattggagagactttcgaggtcaacgggttgaaccacttccctatggacattgaaaactctgtagaaaaatgccaccgtaatatcgtgaatggtggatgtgctgttttccaagctggcggaatgatagtggttgttgtcgaagtgacgagaaaggcttatctagcatctctggttccggtcattgtgaacgctatcctcaacgaacatcaggttgtcgctgacattgtagcgttcgtctcgtacggagactttccccgctctcgactaggcgagaagcagcgtgggaaggtgctggcatcgtgggtgacgaggaaactgcggacgattgcacaatttagcatccgcgagacagaagacagcaacttcggaattccccagcaccgtatgagcaagagttccaaggccggcagcatcatgggccacagcgctcggagatctacgattgtgcccgaggagcctgtgcctcgctctccggctatgcctgccgtccgcctttgttggaaaacccagcagagccgtcaccaacgctggtga

SEQ ID NO: 27822 - DNA, 240 bp, Emericella nidulans
gaggatgaggaggaaggcgaagaccccgtgccagaactcacgcgggctcatttcgaagaggctatgaagacagcccgacgatctgtcagcgatgtggagattcgccgatatgaagctttcgctcagagcctgaagaattccggcggcactctattcttccgcttcccctctgccaatgaggctgcggatagcggcaacacatttggtgaagccggtaatgacgacagcctctatgattaa

SEQ ID NO: 27823 - DNA, 576 bp, Emericella nidulans
tctctcgtcgacgaccacactgatcacactgagcacaacgagctcaagaaggtcgattccgccattggtggcttgtcgatatcccccaaggatgaaaaagcatccgacaaggctgagaaggcagacaagaaagctcacagacgcacctcgtcccaggccgaaggtgtgtacaacatcaaggagcttgaagagaaacgcattgagattactctgcccatcgaaacacagaagacgggatggaagctgaacacttcaccgtcaacaatcgaggacaaggacatcctcaaacttcacctagtgaacccgccggtgaagaagattgaccttcatttccctctagggttggaagtaacagcccgcaatctcaagggcgtgacaatcaaggatgcgctggacgcaatctacaagcagttcaagaagaaggctgatgacgaattggacaagccctacctcgctggcttcgagtgggacaaggaagagtgctggacacgtctcattgttcaccagacaaagcagggccctcctgctcagtcgtcaggcaagaagtccaagaagaaggccaaggaagaagcgtag

SEQ ID NO: 27824 - DNA, 384 bp, Emericella nidulans
gacgcagatgtgtattggcgctcccgcaatcgcggtcgcgacgattcgccctgggctcgctcagacgaggaaaacgatgagaacgaggccgacgaagaggagaatgagaatgaggacgacgagcacgataatatgaacggtgacgataatggcagggaggcgaatgggagtcgcgaaccgacgttggatgaaatggatactgtgggggagaatgagccggagacagatccagatcgctcgccgacgcctgtaccaccgccgccgccgccaaagccagagtccgtgaattatcgccagaagttcttgctcagagggcatttacggggggtgtcggctgtgcgattctcgccggatgcgtctatgattgctagtggaggttcgtaa

SEQ ID NO: 27825 - DNA, 354 bp, Emericella nidulans
gaacagctgaagtctcgcttcagcaagaacaaggacaaggctcaacaagaggcacccgatgttgccaacactgctgcccaggctgctactggtccaagcggtgactctgtcgacccttattctggagttaatgcttcactccaacacgcccaatccaaggtccctgaggaccagaaagcggaggccaacaaacgacgccaggaatacaaggataggactaagaactatctctctggaaagttccctcaagagcgtcgagaccagaccatttatcgcttgaagaagatgattctggaaatccagggccaccgggactataagttaatcagccttatacactatgagcaccgctaa

SEQ ID NO: 27826 - DNA, 486 bp, Emericella nidulans
caattcacaatcgcttcccttatcgccaccgccgtccttggactgcaaatggccagcgcagccccccatgcccccggctccagcaacgccgcgatcatctctcaggcccaggaacagaacacctgtggcaacgcgcacctctcctgctgcgagagcaccgacaacagcgtctccttgactcaggaggaagaggagggtcttcttcacctccttggtggaacgagcagtgtgctgagcgacggcttgcttgggaagtactctggctgctcttcgctcgcttccgttgagggtattctcggcgccggcggtaaccagggccttgttagtggacagtgcaacaaccatgttgcttgctgtgatgctggtgataatgagctggtaggtttccttgaacctggtgttgctgtcctcaagccgaattctgatggtatacagaacggcctcgcaaacgtcgctgttccttgtgttcctgtccaggttctctaa

SEQ ID NO: 27827 - DNA, 663 bp, Emericella nidulans
tctctttcaaaagccgacacagatgtcatcctgaataaggccaacatcgccctcgcccgcagccagcgccttgtcgcatcctggctccccgcaacgcctgcaacaggcgaaaacaatgcgaaaaccgacgccgagctgcaaaaagaagaagaggagatttttacagctgttcctgagacacttggtctcggagcgccgttgcctacgaaagccgcagatgggagctggaaccgccaggagctcgattcgaacgatgaactacggagacagctactcgggagacattataaaagggttatggctgagaaagagaaggcacgacaaaagaccgctgatcctgcgtccaaaaatcatgcctcgaaaggagcgccaggtcataaccagcagggctcggctgtcggaaaaaacgaagatgtcgatgatgatgatgagggccgggcagcgtcaattagcaagaacgcatcgtcgagaaagagaaaggtcggggggagcgctgagcctacaacacggactgaaggtgcggatagcgaaacgaagtacaaggacagtgaggaagagaatacggccagctcacaagggcttagggccaaggggaggaaaaaagccacaagttttcttgatgagatcttggctgagcggtcaaagaagagaaagaagcgatga

SEQ ID NO: 27828 - DNA, 384 bp, Emericella nidulans
gtgcccatcattgcaacatggtacttctccggccgccttgctggtaaagtcaacctctccggtgtgcagcagtccatcctcctcgccatcggtttgcaacgcaaatcacttgatgacgtggagaaggaactcagtctcccctcatctcaattgctcgccatgttccttaagatcgtccagagcgctgtcgcagataccctccctgcggagaatgtacccgccacctcagccgccgccgatgcacatgacgaagtcgtcgacgagcgcttcaagcccctcgagactagtcttgacgacgagctgcgtgaaggcggtgaggaaatcaacgcggagatgcgcgagaaacagcgcgccctgattgatgcattacctctcgacaagtga

SEQ ID NO: 27829 - DNA, 582 bp, Emericella nidulans
aaggcctactggtacgacaacaagcccggcgaccagcgcgaaccccacgactccggccgccccgtctcagaagactaccttgcctctctcggcgtaatctaccgccacttcccagagctttcggatgtcgacgcgctcgccaaggaacgcggctacaagaaccgcgatgagatcaccgtctcccccgcaacaatgggcgaggcttacgaggataaggtgaagatgttcttcgccgagcatctgcacgaggacgaggaaatccggtatatccgtgacggagagggatattttgatgtgcgggggaaagaagacgagtgggtgcgcattcgacttgtcaaggatgatctgattatcctccccgcgggtatttatcaccgatttacgaccgataataaaaatttttttggccttattgagggtatcatgatgctgacgtttggtgtgcagtacatcaaggcgatgcgactgttccaggaggagcctaagtggacgccattgaaccgtgcaccggagcttgatgagaaccagcaccggaagtcttacctagagggactcactgctacctcaattgctgcgaactag

SEQ ID NO: 27830 - DNA, 348 bp, Emericella nidulans
gaggagaagcaggcagctgaagactgttttcttcagggtgagctgaagtgtggagacgtcgacgggcaggagtgcgagtatagccccgactgcggagagggcgaggcttgctaccggaatgactggttcacgtgcaatgccttcgaggcggatagcgatagaggctgtcagggggtggatggcgcggagctgaactcgtgcaagacgacaattgccggagggtatacggtgaccaagaagatcaagatcccagactatacgtcggaacatacgctgctgcggttcaggtggaactcgttccagacgccgcagatttatttgcactgtgcggatatcgctattgagtag

SEQ ID NO: 27831 - DNA, 1146 bp, Emericella nidulans
gctacaaacacaactttgctctatgatctccctcctctcccggcgtatcaattgacaccgcgcccttcgcttgttgatggaatcccagacaatatcctcgcgttaatcctgccggttgttgcctactgggccgtgtctatgtttttccatgtcatcgatgtctatgatttattcccgcagtaccgtttacatactccggccgaagttcttacgagaaaccgcgcatctcgatgggacgttgtacgagatgtcgtcctgcagcaggtagttcaaacgctcgcaggccttatcttggcctactttgacgagcaggaatacattggacgggaagaatatgacgttgcggtttgggcgcgccggatccgttttgtacaaagaggtctcccctacctgttggctttgttcggtttggatgcctctggtgtggctgcgaacttttctcggaacggacacaagatgctagcgggagctgttgccggtggatattaccctggtgctacccagtccattgtctccagtggtggcattgagacagttgtgcctgcttttaccaactgggaaatgtctctggcagctttcatctcctggtatttcatcccggcgctgcagttcacctggggtatctgtgtcgtggatacatggcagtatttccttcaccgtgcaatgcatctgaaccgttggcttgatgcatgtggttcttcaccttctccactatcaagactgtcgatgatcactgcgctacgctttcccttggatccccttcagcatgcaaccaccaacaacgctgcttaccatgatatccatcaccaaagctggggcatcaagacaaacttttctcagccgttcttcactttttgggaccgcctcttcaacacccaatggaaaggcgaggtgaagctccgttatgagcggtctcgagaggccgctgaaaaaaagcttagcgagggaggaatgcaacaagactcggatatggagaatagttcatctgatttcgcgcaacctaacggggaagctgccgttgtgtcccccgaggaaccttcggacagagacgcaaggactcgcttgcgcaagaagaccgccagcttctctccgtctgttgactcgctgaagggggttaaccatggtgtgcccagcagtgtcttatag

SEQ ID NO: 27832 - DNA, 1938 bp, Emericella nidulans
caggatatagcagacgccatcgcgcagcacctggagactgttcggctatcgtattgccatcaacgcaccgagacgttggtcaagagccttaccacctttgtgaaggaacacgatgatttcgatcctaccgaatcctaccaagtgaccccatctcagtcaacaatcaatattcccgaaacaaccgaagggggtgaccgtgggatcccagatacccctggcgacagtgatcgtagcagcccagaggctgcggaaggcgatgtctttgaactcctcggtccatgttctccctctgacgggaccggtgaagcctcatcgctattctccaaagttctcggttccgaacagaccgagcagcatttggtggacatggtcgagtcactcgatttctcagggatcaacaatcttaccgcgctcgaggatccggctcagggtctgtccgatgctggcatgacatctctcgagactgacttcgacttgggcgacctggtcgaagaagtggtggaagtgcagtacactggccaaaaccttcctaaagctgccgttcatctcaaccatcgatcttccccgtcgccacaggatttcgatgctgataatgcagagttgtcagtcatcgtccgagtagaggacatgcccacctggaagatccactctgtgcctggagcctggcgaaggattgtgatgaacttactcggaaactctctcaaatggaccaaggctggatttgtcgaggtttctctgacgaaagtgagacgaaagcgcgaccctctgcatgtctttgcgctcctttctgtcacagataccggcgctgggatatcccagattttctacgacacaacgttttctcacccttcgcccaggagaatgcattgtcagaggggcttgttcctggggcttagcaccgttcgtcagctcgtcggctctcttaatggccatctcaacgtgcgaagtgagcttggcgtcggcactcaagttgacatattcgtccccgtacagatactacagcctccaccaaccccccgcccagacctggcgcctcgttacaatccctctcagcggccacctgttcgcgtctgtttgatcgggttcagcgattatccttgcctcaaggagacgccaactgggattttgcctgccgaagcgaagcgtaagctggccattagaagctgtcttacatccatactggcggagcaacgatcttgggatattatctcatccgaatcgtttcacggcaccgaaggtgatatcgcaattattgaagaattcagatacctggatgcactgaagagcggcgaattgcccgtaaatgatcctaaaccagccggtttcaggagaatattcgtgattcttaacagcaagaatcctacctctcgccatctggattcatcacgccttatccgtgtctcccagccgttcggttctagaaagttccgcaatgctgtcgtccgtgttgaccagctactgaaggaaccgccacccgaagtttcttccgaccaacatctccgcaagcctagccccgtgccggagcaggaaacgccgcggaagactccatctcctcctatgcaacaaatgcctgtgaacgcaccggtactcgagcattcaacagttgaactgactagccatggcactacggaccctgtgcgaatccatgagaatctccaccttttgattgtagatgataatgcgataaacctcaaagtatgctcgcacttcaacatcttatcaccatatatctccatgccggtcatggatggcattgttgcgacgaaggaaatccgccagtttgaggaggaaatgggtctcaagcggtcgcgcataatggctgtcactggagtggcgtcaacagacatgcagcagcgtgcccaagctgctggggttgacgagtatctcgtgaaaccagtgtcgctggttgctttgaagaaagttattgctgcgctttag

SEQ ID NO: 27833 - DNA, 669 bp, Emericella nidulans
gcccagcaacaggatgacaatgttatgcgaaggtttttctttgtgatcttctgtgctatctcacgtgggtctttgctggagggtcttgctgacctatcgctactatctagaaagctggtgatcatcggtgacggcgcctgtgggaaaacgagtctgctgagtgtttttacattgggctacttccctacagtcccaacggtgttcgagagctatgtgacagactgccgggtagacggccggtcagtccagttagcattgtgggatacagccggtcaggaagattacgagcgactgcgtccgctagcctactccaaagcccacgttatcctgatcggatttgctgtcgacacgccagattcgctcgagaacgtcaagatcaagtggatcgaagaagcgaatgagcgatgccccggcgtacccatcatcctcgttgggctgaagaaggacctccgcgagaaccccggagcgatcgaggaaatgcgaaagaagtctctccgatttgtgtcgcccaaggaaggaagtgaaacagcaacgcagatcaaggcccgaaaataccttgagtgctcttcgctaacaggcgagggtgtggacgacgtctttgaagccgccacccgcgccgcgctcctcaccttcgataagcggaaatcctcatgttgcattgtgctatga

SEQ ID NO: 27834 - DNA, 561 bp, Emericella nidulans
gctaaccgtccagtctccgtactgggctactacctgcccttccttcttgcaggcggcgccatctccgccgtcggctacggcctcctctcgacgctgagcccgaccacctctgtcgcgaaatgggtgggataccagatcctctacggcgtacacgtggctgcaccaccgccgctcaatggcaattatcatcttttggcagaacattggcgccgcatatctctcattgcggcaaacgccatcttctccaactccctccgcgaccagctagcccagcgcgcgagtcagatcaccgtctccccgggcgcgattgttgcggccggtgtccggtccatccgggacctcgtctccggctctgcgcttgcggctgttctggaggcgtatgcggaggccatcgacagggtcatgtacttgggcatcgcggttagcgtgatggttattgtgttctcgcctggtctagggtggaaagatattcggaagacaaaagatctgcaagctctaactagcgatggagcgcagggtgaagcgacggagaaggagactgttccggttgccctgggttaa

SEQ ID NO: 27835 - DNA, 309 bp, Emericella nidulans
  unsure (1)..(309): unsure at all n locations
ggcctgaacgaggttgtctcggagctcacgcacgatgagacgaagggcgtgattgggctgggcttcgacgttgagggccatatggtcagtggcggtgggcagatagtcaangtctggcatgaggcagcagattcgatagggggtgagaagcgtggctttgggggagacagcgatgacagtgacgacgattccgacgatagcgatcatgagccaaagcagggcgatgactcgcggcggaaacgcaagaagcagaagggcaaagatcgtggcaagggccccgagatcatggcgtttgctgatttggattag

SEQ ID NO: 27836 - DNA, 615 bp, Emericella nidulans
gttgcaacacacatagaatacaccaaggaaaacccattgaaccgggaaccacctgtcagggagctcgtttcaagcttcataacccccagctcaacatcctacgaccgaaaccacggccctataccccacctttccgccgatacgcatacaatagaagtagacggcctcgttaaaactcccctccgtctgagcgtccaccaactcgccaccgagttccctcaacatgaggtcctatgcgcgcttgagtgcgccggtaatcggcggcatacgatgcgaaccatgctgaaagaagttgacggcattgattggggcgatgcggcgattatgaattgtaaatggaggggtccgagactgagagacgtgttacatcgagcgggggttgatcagtgcaagggacggcctggactgcatgttgccttctcgtcttttcaggtgcagtgtgaagaggatgagtggtttggggggagtgtggagttggagcgagggttggatgaggaggctgatgtgatactcgcgttggaggttggttgcacccatgcttccactggtattccgttctacacactctatgacttgatggctgatcgtcagccagatgaacgatgctccccttga

SEQ ID NO: 27837 - DNA, 846 bp, Emericella nidulans
gaaacgcaagggcacgggtgtggcaagatcccccgataccctcatcgtgacccattctttggattcgacatcgtttttggtatggccaagtccctgcgcaacgactacttcctcgtctggctcaataaagtccatgagaacctgccaaagaccttcttagtgaactttgtcggtacccggttcatctacaccattgtgcctgagaacatgaagagtatgtctgcaatcaactggcaggactttgccgtcggtccaatgcggcgcaataacaaggcgactgctccgtttgcggacaaaggcgtcaatactgttgatggacatgagtgggaattcagtcgatttctgatcaaaccattcttcaagcgggagacattcacagataccagtcgtctaaccctgcatgttgaccgtgtcctggaacaactgccagcggacggtgaaacagtcaatatccagccactcattcaacgttgggtgcgaatatctaataccgtggtccaaaagttccttgacgtgaccaccgcgtctctctttggggagtcgatcgagtctctagtctatccggagagagcccctatatgctgggccatggtggacgttctccggggtctccgtctgcgacttcagtggtacaaatacctctggctcttccgccaccaggcatggcttgatgctgtggaagtagtccatagatatctgaacgcacacattgaccgaacgtacaaagagctcgatgagtataaacgccaaggcaaaaacccagaggcggccgatcgcaacgacctgttgtggtatatggccagcaatctgcaggacaaggaagcctccggtcccagatctgcttga

SEQ ID NO: 27838 - DNA, 291 bp, Emericella nidulans
ggtgtcgaagttcagcgcatttctccaggtgacggcaagaatttccccaagcccggggacactgtcagcatccactacaccggaaccctggccgacggtagcaaatttgacagctcccgcgatcgccccggcacctttgtcacccagattggtgttggccgtgtcatcaagggctgggacgagggtgttctccagctgagcgttggcgaaaaggccaagttgatctgtactccggattacgcctacggcgctcgccagagtagcgaggttgagcttctcaagatcaactaa

SEQ ID NO: 27839 - DNA, 783 bp, Emericella nidulans
gaccagacgtacaaccccacgccttcggcacccgttatccgcctcatggtcctcgagaccgacaagcctcatccagacacacactccgagcgcggcaccttcggcaagatcgttcacgagcattttgctaccgccgggcgcgcccacaagccaccgtttgacagcttcgacgggctgctcatcactggaagcctgtacgacgctcacggtgatgacgagtggatcctgcagctgctggaacttctcaaaaccctctggatcaaacgagcagattttcgctttctgggcgtctgctttggtcaccagctccttgcccgtttgttgggaggttcgattgggccggcgccgtctcaggactgggagctcgggcactgtcgcatcgcgctcacgcctgttgggcagcgtctcttccgcacgcgtggggacgataaccatgtctacttgcaccagatgcaccaggatcaagtaaagattgcgccaaccgcggcgtccgcaggaccagacatgttgccgcaggatacagagattgcagtctggggccacactgaccatacgcctgttcaggggctctatatcccaaaccgcctattcaccacacaggcgcatctcgcatttgacgaggatatggtcaagcggcagatccagattcgggtggagaagggcgcaatctctgatctcgaacacgcggatcgggctgctgagacggctgatctggagcatgatggggttgaggttgcaaaggctatactcaggttattcatggatgatgaggagggacagtga

SEQ ID NO: 27840 - DNA, 525 bp, Emericella nidulans
gtgagctctccagatccgaatcatccaaatcgggcaccgttactgatagtgatctccctagttgtccgctctcccgaagatcccgcatctcgtgaaaatgcattcgactatgtcatcctgtgcgtcaaggcgctccccgatgtgtacgatctggccgccgtcatcgagtctgttgtcacccctcaacacacatgcatcttggtcaatacttcaaataccctcggagttgaatcacacctagaacagcggtttcctaccaacgtcgttttgtcccttgtatccggtgtcgagataacccagaccgggccgagcgaatttgagcacatcaactcatcagatatctgggttggggctacaagtagtaactccggaatcccggctgaaatccagaatgatatggctcaagcgctggcgatgacgctcgcgtctggacaggtcaactgcaaagtatcgtccaacatcagacaggagcagtttgagcgtatatgggtaaccggcgcccatcctcttgatcttcgccaataa

SEQ ID NO: 27841 - DNA, 939 bp, Emericella nidulans
ccgaaatacagcgcccagtatcccaataccgacggttccttcgccagtactttgaacccgactacgggctcgcaggacggcgacccagccgccaagccgctgatcgtcttccaccttggcgcaagatgcaatcacccactgggcctgctcgcgccgggttataaagagctgggggactgggccgagaagatgtatgagtccctacgcgtgaatccggacaaatatggcctcctaggcatgacgcggtttgtgggccagtcggatgccgcgggaaacgaaacgcttgttattatgtacatgcgtgactacgaggggctgcatcgctttgcgcatgaccagctccatgcggatggtgtgcgctggtggactgggattgttaaggcgcatccgcatctggctatctggcacgagacgtatgtagtgccgaaagggtgctgggagaatatctatgcgcagtcccaggttacggggatgggcgataccttttttcctgtaattgatgaaaataatggggcgacggagtgggcgagggcaaaagccgatgcagcctggcaccgcgttgggttgctctccgacttccctgagatctctccagattccgactgccaggtcacatcatcatgcaagacgttccgaatccccactggcacaaccgagaaaccggttgagacggatattggcctaccgggtgacctgaaagaccaagtcttagtgtttcggtataaagggaatgttcatgctattgatcatatgtatgaagactttggcatcacgctcagtgcggggataacatgccctaagcatgggtgggggtttgatatcttctctggcaaggcggatcgagggaactacaagttgaagatctgggaggcgcaagccgtcaaaatgataacggcctctcacgccgttggctcaaagcctgcgactgaacgttgctaa

SEQ ID NO: 27842 - DNA, 831 bp, Emericella nidulans
ttgggaccacgcgaccaactcccgaactacggcgacacttcttggtgccccgctggattgcacccccatgagcagttttcgataagccaactttggaatctgcgcgtgccgttctgcagccgtggaagcctcgcgacgcaggcgtgcgccgtgatcgaagagcagctgcgcgatgtttcgtcatacaccatagttgacatctgcgcgggcgccggcggcccgaccccatttatcgagtccgaattgaactccaaggctgaagcgcagggaaaagaaccggtgcggttcgtgctcacagacatgttccctccagtggacgtgtggagcgcgattgccaagaagcagccaaacatcgaattcatcgagaggcccgtcgacgcacggcatgtgggacggctggcggcgaacgacaagagagagtgtcgagtgttcaatatttgcttccatcattttgacgatatggatgcgagggggatcctgggcagtgccttggacgaggcggatgcattcattatcttcgaaatcaccgcccgccaggcctcgacgtgcctctactcacccctcgtcttcttctggggcttctacgtctcattgctgtggtactggcactctcccatgcatctgttcttcacattcctcctgcctgaaatccccttggcgctctgggtggacgggttcatctcgtgtctcggcacgcgcaccccagcagagattcaggatctccttgcgagttcagggcgagaccttgacggttggacctttagcagcggagagaagaacgtgcagtggccgttcattacgctgtactactttgtgggaaggaagtcttga

SEQ ID NO: 27843 - DNA, 1155 bp, Emericella nidulans
tcatccgataccttcaagcgacaccacccgggtcagctcagagccgttgctggagcctatggtgtgccttaccttcatggacagcacgcgccagctcctgttgccgcaacctatgcactatggtgtccgcaaactccctacgctggggctggtcctcatcagcctactccctacggcgcaccacaggctgctcagccacgtggtggcccgacccctgctgctcccgtcggcggcgctatgcccggccagccgttaactcagcagatctatatcccgaacgatatggttggcgctattatcggtaagggaggcgctaagattaacgaaattcgacaccttagtggcagtgtgatcaagatcaatgagccacaggaaaatagcaacgagcgtctggtaaccatcactggtactcaggaatgcaatcagatggcgctgtacatgctctactcaagacttgagcaacgcagaatgcctcacgtcaccgaatttatttacttccagcccaagagctccgtggagcctgagaacccctcaagcgacctaggcgccgcccttctccagctcttcaaagcaacaacacaacaaagcggacaccttggttctgcatggggtcgtacgaaggaggataagaacgttatcgtttgggcgatcgactggtcggacgcccacagtgggattcaacaaacgaactccccgctcgatccctatattgaggaaaacacccaaataacaaccctcttcacaactctcacacccaccgactccgacgacaccccagcaacatccacgcttgtctcaaaccccgtgaccgagctcgccctctggccttcccaacttcgctctcccgaccgctcatctctcgtcgctcacctcaccacattccgcaagaccctttcagaagacgcggaggagaaggtgcgccccaaatcgtttctgcttgggcaggttgagaggccgggagagtttgcgcatgggaagagtgagtccggtcaggcgtttgttcatttcctggttcttggctgggagagttatgagcagcatcagcaggcgagggacacggaggggttcaagagtacgattacagccatcagggagaagatggtttcgccgttagatcgattgggaatgaagcacgttaagttccagaaggtgtag

SEQ ID NO: 27844 - DNA, 2211 bp, Emericella nidulans
ttctctccgctagcgttcccgacgggcattatcctatatgacctttcgttctccatgccccctatatcgcacctagaactgtatccatttgaaatatttagagagccactggtggttcttgcaattgccgacgggacggagctcaccggcgatacaacccagacgggtcccgaatcgagtacagacaagccatcgaagccgaaaggactcgaacaacttgaacaggaactcgatctattaagagaaaagaatccaagggcactggtacatcagctcctcatatttgactacgaaggggtcagcaaggtctctaatggcccggataacatactatggattccgcccccgcaggtttccaaagctactacgatgaagactgtcctgtgcgatatcacgtctctcgtcctttctgaaatggacgaatttgcgaagacaattcaaagtataccaaccattgattccccgaaagcctcatcttgggggccacatcgcgggccagatttgcgccggcgtccgacagacaagctgtttcataggaagacaatgcctgcgcttgcaagcacaaacggcacttcggagactgctcaaggctcgacccaaagttcgccggcacctgaagatcatgagacgccgacaacattcgacgagatcactcgttccatacagctggctagtcggtccagcaccaccctagggaaaccaggatcactgccatcatccaaagaacacattgaggccgcatctaacgctagagcaagtagcgattatgtgtggcatgccaaagccctcgagtcaattctcctctgtttactgatgttcgcctgggctggcatggactttcaggttcctccaatctgttatcctgttgcggacaaatcttctaaggcatcggcagcaatcgttttcgatccaacctcgagtcaatcagccgggaatcgaatcatctctctccaaaatctttcaaaccttctaccggacctggcaaacaatattttgaatttatatacccgcgcagccaatatcacagatgagcctcttccccagctcgtcttctccgagacggttatccgtctttcaaggttattagtagccacacgcatccgcgacggggccttggatgacaacgctttgaagcatattgtaatgaatgagccgctagagcctctcgttcggccggagcgtcctcttggtctgacaattcttcggaagaacgaaattgcaaacttcctgttccgtgcgttgccgttttctgctggctcggatttgcctgcgacagatgccatacctatcctcataggcgttgtctctgtcttgaacgcgcttgacctgccacggaaaaaggcatttgttctgagggagctactttctatcctggttccagctctagtaacagcccgcaaaattggggctgcagaagtgggcattcatcctgcagcgggcttatcatctctcagtgatactgctttcgacataaatgcccttgatgttggcccggggaatatgaaccgtagcatgcgttcgcttctcgctacgataggagagatatacggcgtgcagtcttcatctcaaattgaactggggaagcgaacgtcggttggcggcaataattcccagagcccggactcaatcacagcaatcaccgaacgggccttccggcacattgtgctggatcgctacggtgatttgaatcttaaaattgatgttctcaagatgtgcatcaactcatgtgaagcgctcccagattttggtggtgtcctgcggtttactgtcgagctcctccagacgattcgcggggatctcatgctctctaaatcttcctacaccgcaccttgcctgcagcctgatgagcagatccgcctactgaacaatatcaagcgaactgttggtgctgccaaccggcttggtgtagcaggccttgaagccgaatattgggacgacttcttggttcggggggttgagttgttatctttatctgatcctaagaggcctgttcgtcgatctaagtcagagctcgatgctgtcactgcgacgagtgagaagtccaaaaaggatcccttcttatacaacccgttcacgaaatcagcgaataaagcttctgagcttctcatggttgctggagagcatgcagctgtccaagtcactcttcagaacccttatgaatttgaagtcgagattgaaccgatacgcctggagagcgaggtgtatccctga

SEQ ID NO: 27845 - DNA, 1083 bp, Emericella nidulans
tccaaaggtgtttccgaagtttttgtttttggcgacaaagtgattctcgacgaagcggtagataattggcctgtatgcgacttcctaatagcgttcttctcggatggcttcccgctggacaaggctatcgcctatgcaaggctaagaaggccattctgtgtcaatgatctgcctatgcagaaaattctgtgggatcggcggctgtgtctgcgcatcctggaccatatgagtgtccctactccgaagagaatagaagtcaacagagacggcgggccaactttggaatccccagaacttgcgcaacatgtatacaagctcacaggtgtgaaacttgatggccctaccgatggcacagggggaggcacacccaaaacgaagaatgtcactttgtccgatgatggcgattctcttatcgttgacggcaaacacttcaggaagcccttcgtcgaaaagcccgtaagcggggaagaccacaatatacacatctactttcctaaagaccagcagtacggaggcggcggtagacggctttttcggaaagtcggaaataagagctctgaatacgaccctgatctccgtaccccccgttcaatcttggaagatggctctagctatatctacgagcagttcctgagagttgacaatgcggaggatgtcaaagcttacacatcacccggctcatcaaagtctaacggcaatccacaacatcagagggattcggatgttggatctttggagtcatcacaccccagccttacagcgcctagtcacgacggcatggacttcaataatgggcgtgccggcgttatcccaaaggaacagtcagcatcacccggtatatgcactcctcagggtgcgaatcaaccctcacctacgatgcacagtcttgaggcaaatcctccgccgcctgcctctaagcactcatggaagttgaagggtatggttgctgtcataaggcacgccgatcgaacaccgaagcaaaaattcaagtttactttccacagccagccatttattgacttattgaagggccatcaggaagaagttgtgatcaaaggagaatctgcgcttcgcagtgtataa

SEQ ID NO: 27846 - DNA, 1305 bp, Emericella nidulans
gatcagctgaaaggaaaggctgtcaaaaacgctacgatcaatggtggctcatgcgatcccctcaagctcgatgaaaacggaaaggcctattatccctgcggactcatcgcgaactccatgttcaatgacacaataaataaccctatacttgttaacggccgcggtggtgatcctgagacgtacaatatgaccaagaagggtatcgcgtgggacagtgacaaagagctcatcaagaagactgagtacgaaccaggtgcggtagttccgccacccaattggcgagaacgctatcccaactacgacagtggaatcccaaatctgcatgaagatgaggatttcatgagtgctgacagcatgctagcttttcccgtcactgattatggcggtaccaaatctattctaatttccacccgaagtgttcttggaggccgaaatccattcatgggaattgcctacgttgttgtcggaggtgtctgcgttcttctcggagctatgttcacaattgcgcacctagtccgtccaaggggatattgtgctactgcaggcccagatgaatcgttgaaggcggaatttagaaaattgagcgctctcgaaaatgatggcatagtcgagcaaggaagtcgtaaggcgctggagcccattgagatagagttatcttacctccaagatgcatatcaaaacgcttcaataagctaccgtctcgaaggggtaacgcgccatatcaacgataaatgggcgcgtaatgaagacgagcttagcatgaaagatgccctccgtagaggcagctaccgaaccctcaatgtctacttccagtccgatctccaagttctctcaggctccgaatctcagggtcgtctgctcggtacttcggaacagttatcagcaagcgttctcggcttctgcactttacccgacccgagtattaacagtactagtctgcgttccagctatgtgaaggacggatgcaacgtgcttgcaaaaactatgccaggggggtctctaacgcattataaccgaggcggaaccgccatacacgaaattggtcactggaacggactcctgcacactttcgagggggagtcttgctcccttgacaacgagggtgattatatagaagacacaccccaggagtctattccgaccgatggatgtcctgctcgcaaagactcatgcccaggaagcccgggtgtggaccctgtacacaactttatggattattcttctgatgagtgttacgagcacttcacgccggcccaggttaagaggatgcgtgacatgtggttcacgatgagggaagggaaatga

SEQ ID NO: 27847 - DNA, 852 bp, Emericella nidulans
ctgaatattgcctcggcccagctcgccgtctccgtctcagcagcaggtggcctgggctttcttgctggaggtttcgacgtctcgtctcttgagagcaatcttgaagaagccgtgcagctcttcaagcaatcgaactcacctgctcaacaaaactacgcgcaagcggtacgtgctgtgaccgacaacaagacaaagatctgggtccaggtaggcactgtaagcgaggcggtcgccgtcgcagagtccctgagtccagatgccttggtagttcaaggctcagatgcaggcggccatggcctgaccaactcagcatctataatcaccctcgtacctgaggttaaggatgctcttgaggcgcggcagctaagggatcacataccaatcatcgcagctgggggtatagtagacgggcgaggcctggctgcatccctggtgctcggagcttcgggtgcggctatgggcactaggtttctagcctcctcggaggcaaggatcgcccgcggataccaagacgaggtgctccgtgcatctgatggcggcgtgagtactgttcgctccactgtgtatgatcgtgtgcgaggaatcttgagctggccctcgcgatatgatggacgaggcgtaataaatcagacttatatcgatgccgtggaaagaggtatgagtgacgaggagaataaagcgctctacgaggaagagttaaagaagggagactcgggatggggcccaaatgctagattaacaacatacgctggcaccggacttgggctcgtgagggaaatccttcctgccgccgacattgtagcaaatgtgattcgagaggcagaaagtaccttgcagggtctgaaagtttag

SEQ ID NO: 27848 - DNA, 1446 bp, Emericella nidulans
tcttccaaaacgacacccaccgtcccgccggtggctctcgattctatcacgcaacatattggcaatactcctcttgtgaggttgaacaaactaccgcagaacctcgggataaatgcgacggtatatgcaaagctagaatacttcaatgcaggcggaagcgtcaaagatcggatagctcttcgcatgattgaggaagccgaacggtcaggccgtatcaagccaggcgacactctgattgaacctaccagtggtaacactggtattgggttagctctcgtcgcggccgtcaaaggctacaagaccatcatcacccttccagagaagatgtctgctgagaaggtttctgttttacgggctcttaacgcgaccatcatccggactcctaatgaagctgcatacgactcgcccgaatcccacatcggcgttgcgaagcgtcttgaaaaggagctaccaaatgcgcacatcctagatcaatatggtaacgaaaacaatccattggctcatgagctcggcactgcgcaagaaatctggagtcagactaaaggacaaattaaggcgatcgttgctggcgcgggtacgggtggcacgattacagggctctcgcgcggcctgaagaagcacaattccaacgttcaagtgctagatcagcacgccgtcgacaagtggtacaagacggacgacaaagaatccttccagtatgctcgccgtttaatagctgaggagggccttctcgttggtgggagcagcggaagcgcaatcgcggccctggtaaaggccgctagggacaacatgtttaaagagggtgatgttgtcgttttcgccgacgacgattggcttgccgccaacgatctcctaccttcgttaccgactgaagtcatcctccaatcctccaataagcagactcaaggacaagacgacgcttttgccggtagtaaggttagctcgctccggctcaaaccagtgacaaccgtccactccaacgtcccttgtgagactgccattgaagtcatgcgcgacaaagggttcgatcaacttcccgttctggcaccatcaggcagaaagcttgtcggcctggttacactcggaaacgttctcagtcgattgacgcacaaccgcgcaactggtaggagccccgttgccgacgtaatgtttgatttccgcaccatttccgaggtcgtcaccgatcctcgagacatgggtcttgcgagcttggagcccaatcagaacgggagggatgcccccaaaccacaaaccaggagcaggaaattcgtcgagattactatggatacatctttaagtgtactgaatcgcttttttgagtggaatagtgcggctattgttacggaaagagatgaaggtgggactctaaggcccgtggctgttgtcacgaaagttgatcttcttacctggatgctccatcataagaagaacggcgcatcggaatag

SEQ ID NO: 27849 - DNA, 822 bp, Emericella nidulans
gggtccatacaggtcgaggacttccttggccaaggccaaccgactggagacagccccaagtccttcgagattgctgacctgggagctgataacacatctgcgaccggattgaaggaagacatcatactcgtgtcttggtttatcgcgctcttgcggacgagggaaagcagccaagtcagctatgagtgggcgtatggaggcggggatagtccaaaacggctggcgatggaggaattgaagattggactccagagcagtgttgaagaggccgccggtgcggtttctgactatattgcgactgttgcgactgccgtggcagacacatctggctcgacttctctcattttgagtaacgagtctctgtcgcagacggctgaggcgaaagatgaggacttttatctgcgaccgacggacttcgatctagacagtatctggagctggaaccacgttctacctccatcgtacaagttctgcatgcacgaaatggtatcagagcaagctcgcaggttccccgaaaaagaggcgatctgctcctgggacggcagtttgacatatggccaagttgacctgtattcctctttcgtggcggcctcgttgaaagacttgggcgtgagggttcatgatgtcctccctgcatgttttgagaagtcgaggtggacaattgtcgcggttcttgggatcatgaaatcaggagcaacgtttgtgcttatggacccgacccttgcttgcgcggcttcaaaatatcgcgcagcaggtgggcgcaaagatgatgttgtcatccagcaagcagcacgatctggctacgatgattatgccggatag

SEQ ID NO: 27850 - DNA, 819 bp, Emericella nidulans
ggtccaaggaaggtcatcgtttttggggcaacaggagatgtaggctctgctgctgcgcgaaccgctcactcccatggcgctaaagtctttctcgcgctgcgcgacatcacgaaaccagtccccggtctgactgctacggaagaacaaagtgctggatatgaaagagtgcaggccgacctcacgcaacctgataccgtccgcactgcagtttctaagaccggtgccacccatgcattcatctacgcggcacttggatcctcatctgaccactggctctccactgcagaggcgctcaaagctggaggaattgaacttgtggttctattgagcagcttcactgtgcaaggcgatattcgtggatcccgcaaaaaacagattgtcgaggacggagaagtgaagtgggcgttcccagacctgaaggtcgactatatttctccggatgatatcggtgcggtatgtgggacaatcctcgctggtgctttcaagggcgaacatgaaacttcggtttttctgtgtgggccagaaacagacctatctgttgccgatgctattgagactatcggacgggcgatcaataaaccagtgaaagtcacaaaggtcagcacggatgaaaacatcaaagtgatggttgagaagtctggaacccctgaaccattggccagactcttgacagatggtttcgcgcttgagaaccaacaccaaggaatgttgcgtgcagagactccagagatcagaggaaatatcgagagatatctgggtcgtccagcgatgcgcttttctgaatgggtggagcggaacaaagacaagttcagtgcttga

SEQ ID NO: 27851 - DNA, 960 bp, Emericella nidulans
cctataagtacggaactatgcagagactgggttctctcgatgaccgttgttcttgcggacgggacgatcatcaagacgaagcagcgtccgcgaaaatcgagcgccggctacgatctgacgcgtttgttcattggtagcgagggcacgctagggctgatcacagaagccacattgaagctaacagttaagcccaagagccagagtgttgctgttgcaagctttccttcagtccatagcgcagctctgtgtgtcacccgagtcgtggaggaaggaatccccgttgcaggcgtcgagattctggatgatgtgcaaatgaaatgcatcaatgccagcggaaccacatccaggcaatggaaggaagcacccacgatcttcttcaagttcgccgggacaccaaacggcgtcaaagagcaaatcggattagttcaaaagctcgcatcttcatcccaggccaaaagcttcgaatttgcgcgaggtgatgaggagatgcgctctctctggagtgctcgcaaagaggctctctggagtgtcatggctatgaggcgaggtccagaggaccatgtatggacgacagatgtggcagttcctatgagcaggcttcctgacattattgaagctacaaagcaagacatgacgcagagtgggctactagctggcatttgtggccatgtcggggatggaaatttccatgcaatcattttgtggaatgatgcggaaaggcagaccgcagagggtgttgtccaccgcatggtaaagcgagctgttgagatggaaggcactgtgactggggaacatggtgttggcctaataaaacgagactaccttccgcatgaactgggggagtcaacggtggacgctatgcgacggcttaaactggctctggatccccttcgcctactgaattgtgacaaggttatacgagttgagcagccaaagcccgggcaggttaaggaatggtag

SEQ ID NO: 27852 - DNA, 1224 bp, Emericella nidulans
actctggtcgtgatagtgactgctctgctggctacgattgcgttgattgcgtcggctgccaggatggatcatcttgccaaagttcaccctgacacccagatgccggtcagagcgatcctagccacaagcggtctccttgctcttctggatgcagtcaacattggctcgacaacggcgctgaatgcatggatgagtcaggactcttttcgcatatacaatcgccgcaccatactagaagaaggtgccttcttctactcttgtgctctttctagcgcgagagtcttatcggcattctgtggctcgctgtattacttggaattggatcaggccgacctggttgcggccgcctctacgcgcaacccccctgcccgcaggcggttggcgagttcaacaccaaaagacctcagcggtctaattgaacgccggtatcaggacggtcaatccttacatatctccaatcaatccgtcccacaaacgatctcaacaattctcgagcaccggtcaatccgcgcattcctgcctacgccacttccacccgggacactcgaaacacttattgctgccggccaaagtgcttccaccttctcaatgctgcaaacctggtccgtcgtcgcaatccatgacccgcagcacaaagacgccgtcgcgcgagtctccggaaaccaagacttcatacgacaagcgccgctattcttgatcttctgtgcagatctacaccgtcatgcaaacgtaatagacaagtacagaacggccggaaagccgctcgagaagatcgatatgctgatagcaggtgtcgttgacgcctcaatcgcggccgaaaatgtcgccatcgcagctgagtcgcttggcctgggaatctgtatggtgggcggagtcagaaataacgctgagagcttggtcgaactacttcatctccccgagaagacatttggaattgtcgggttggctgttgggtatgcggacccgacagcgcatgaggatatcaagccgcggctgccgatgagggagatactccattatgaaacctgggatagcaaccaacagcggcaggacgagaatgtggcgatgtttgatgacgtgctgagcaagcactacgcacttcattcgatgcttggtcggaaaccatggagtagatttgctgccgagtggaatgctgatgggagaatggacgggagggatcgtatgaggggcttgttggagcggcaggggtttggtctgaattag

SEQ ID NO: 27853 - DNA, 1116 bp, Emericella nidulans
cttcagcatccctcctccaccacaacaatccatctggaccagcctcctagctgcctccaattctgtccagcatctcccaataacttcgtagtcggcacctacctcctctctgaaacaaagactacagacacagatggatcagaaacaatccagcaatcaaagtcgggatccctgcaactctggcacctggatccggagactgatgcactgcaggaaaacaccttcgccattgcaacaagcgacgcctccgtttccctcttcactgtctcaccagaaactgagacaggtttcacgcttctttggacgaagagcgttcacgagaacccctcaatcccagcactgttcttagcttggttgccggagaattggctgaacccgaaagggctcggtgcgaaccccgacgggttcgccgtgacgtttagtgatgggcggacgggagttttcggcttgactgcgaatggggatgaaccggtcaccaagcttgggtctttcgaagcgaagaagctgatcgaggtgtggtttgtcgcggcagcttcgtacttgacctcttcagaggcagaaaaggtgtctacaccttatctcttcactggaaatgactttggcgcgttacacactcgccgcttcgcagatatcccagttttaatcaaccagacagcgcatgacgataaggacgaagaggaggaatcgcccttaccagcaaccctcgtctcatctgatgacaaagccctccaccacaccgcaggcgtaacatctatcctgccgctccccattccgctttcacatgcagccgcaaatggtgagccattgttactcacgggtagctatgacgagcatctgcgtgtgtaccatgcttgtcgaggtggaaggggcgaggtccttgcagagatgggattaaggggtggggtttggaggttgcagttgcttagtgcacacaggtccaccagtaaggaggaatggacgttcctggttttagctagctgtatgcatggtgggacgaggatcgtgaaggttacggttcctggagaagggaaagctgtcattgaaattttggcagagtttacggagcatgagagcatgaattatgcgtcagacacctggaaaggagggcctctttag

SEQ ID NO: 27854 - DNA, 1101 bp, Emericella nidulans
gccgctcaaagctactacaacggcgcgtacaacagccctcctgcatacgaacaacacgatcacacctcagatcaattcaacagagtatcaccacgaccgagcccgagtccagtggcatacaacaacgctccttactaccagtcggacgacccccacgatcctaatagccttcgttacagccaacagtccatcggttcggataatggtgcatatgttgctggagggagaataaacgagcacgaccaatacgcagagaacatacctctcaaatcagcgaatccctacggcaacgaccatcctccccagccttggatgcagcaaccaacccactatgcgccagatcctggcatgatggaaccgcaagtccctatgcggcagaagaagaaagggttcttccagaagaaaattgcttacgttacatacatcttaactatagcccagatcatagtctttattgtcgaattggtgaagatgggccaacttaccggaagcccgatacaaacgaagccccagttcaatccgatggttggtccgtccgcatacgttcagatcaacatgggtgcgagatatacaccttgcatgaaaaatgttcccggagtgcagaacgctacccaacaagtgctctttccctgcccgaatgctacgaccacagattcagattgttccctatccgagctgtgcggattcgacggggtgccaaacccacatcctggcggctcacttgacgataagcccgcacccgaccagtggtttcgcttcataattcccatgttcctccacagcgggtttgttcatatcggcttcaacttgctcgtccagatgactatgggggccgatatggagcgaatgattggttggtggcggtatggattggtttacctgtccagtggaatctggggttttgttcttggaggtaactatgctgggcaaggtgaagcgtcctgtggatgctccggtgcactgtttggcattctcgcgctgttcgtcttggaccttctttacggatggaatgaccgccagaacccttgggttgagcttatcattatggttcttggcattgccgtctcgttatatgataagcctcctgccgggtttggataa

SEQ ID NO: 27855 - DNA, 888 bp, Emericella nidulans
gctttgaccctgacaggcgctatgctggattacaccacccagacaatccagatgtccgggcaggccttagcccggcatgtacctgatgcgattggtctattcttcaaatgcggtgcccagtttgctgtgcgcggcggcggacatatgaatgcaagcctgacgcttatcggcggcatctcctacttcagcaataagtacgggtttgccatggacaatgtggtcaaatacgagctgtgccacgtcgcaacccgacctcttctgaaccctcaagggcggcgccaacaacttcgtcgtagtgacaagattccgactacagacatactcgatgcccatatcagcacaacaatccagcagttcaacgagacgggcatatacgatttcgtccgggcctcgtgcaacctggttctcgccgacgatgacgcttcgacagcggctgggtatcgtgttcggccatcactccatgttcgagacctggaaagcagcggtggcgcagatcgccgacatccagggcctgtacccaaccttcgtgtcaacctgtcccccgccagcgccgcttctgtggcaaagaccaaccagatcggtaatacctggggtgtttttgaggagccgctcatctggtggcaagtcaccactggatgggatagagccgaggacagccttcgcgtcgaggcttgggtccgtcacctggtagagcatctgcatgcaaacaacaagcgcaacaatctggcaagagagtttatctacatgggtgacgcaggcgaatggcaggatccctttgtcgggtttccggctgagaacgtgcagcgcatgagggacattcggcagatttatgacccatcgggcacgttttcacggctgaattggggcggctttaagcttggttactga

SEQ ID NO: 27856 - DNA, 801 bp, Emericella nidulans
tcgaaactcaaggtcgccatctctcagtcgcacacgcggcagactctagcagatacccttattgcgctcaagcacactgctttggctgcggccgctcggggtgccgacatccttctcttccccgaggcttaccttggaggttatccccgcactgccactttcggtacacgctttggcttccgcgaagcccatggccgtgaacagttcctgcattacttcaatggagccgtcgatctgggagacactccagctggagccggggatgattgggtggacaagaaactgcccgtggcaaagggaaacagcgtgaaattgacgttggctgctgcgatctgctgggagaactacatgcctctgcttcgtcaaagtctgtactctcagaatgttaacctctacctggctccgactgtcgacagccgcgagacttggcttcctcttatgcgaacaattgccctagaaggcagaaccgttgttctatctgccagtcaaagcggtcgtcacaaagaactccctagctgggtcacccaagcgccggaaggggagaagatagacgcagatccagaagaatggactagtgggggcggctcttgtatcgttgggcctctgggggagattcttgctgggcccatctggaacgtaaacgatgatagcgatcccgataccgccctgcaaattgttgaagtcgactttgatgattgtgttctcggtagactagaccttgatgtggctgggagctactcccggaacgattcattcactctcaaggtcgagggcttggatctgagtccacctgctctataa

SEQ ID NO: 27857 - DNA, 1128 bp, Emericella nidulans
gcacctcaacgtatcctcactaccccctctccctccctcaatccaaccacgccaaaacaatggcacgagcacctcacagtcgacctattcgtaacggtcctgaaccgctcggttttccaccccttcatcgcctggataatcgtcctctgcctccgcgcccaggctactccctatacgcacccagcgtttctgaccgcgaccgcctacgccacatttttgactattctcaatgtcgcgttcatgataaacgatcagattgcatatggggtgcctagacaggtcgatctgagcgacgaagttgtcgtgattaccggcggggcaagcggggtcgggagattgattgcgcaaatctatggtttgcgtggcgtgagcgttgcagtgttggatattgcggagcagaaggatgtgaaaggctgggaagacgtcggaggggttgagtattataagtgtgatattacggtgaggggtgaagttgaggaagtggcgcggagaatcaaagaagatttgggcacgccaacggtgcttgtgaactgtgcagcgacccgaattaacggccagccgctcctgtcactctctgctgaagcattccaaaagaccatacagacgaatcttctagcggtcttccacacctgccaagtgttcctcccacatatgctgtcccgcgagaacggaggcaccatcgtgaacgtgagctcggtccttggacagctgtgcgccgctggtctcgcagactactcagcaagcaaggctggcctcagcgccctgcatcgcgccttggaggctgaactccgggtatcaggaaacgcggataaagtgaaaatggtgctggtcgagaccggccagatatctacgccactgttcatgttcatcaaaacgccaaactcctttttcgcacctgtcctcgaacccattcgtgttgctcaaaagatcgtctccctgatagacaatggtagaagcggtgttatcagattgccggcatacgccatgtttatcgacatatatgcggctctgccagcaggtctccagcagatcgcccgacgtttgaccggtattgacttcgccgtaccacaagcgtcgtctcaaacaaagcagcctggaaatcccaaaccaacagtcaagagaaaatag

SEQ ID NO: 27858 - DNA, 990 bp, Emericella nidulans
ctatctaatttcctccatggcaacagcaacggcacaccacactccatgcatcagtctcccgaggcctcagattccgagccgagcaaccacaacacaacaactcgcacaaccaccaagcgccgggccgcgaagagagtcgtaatcggtatgagtggtgcaacgggcgccctgatgggcataaagctccttatcgcgctacgccgcctcaatatcgaaacccacctgatcatcagcaaatgggccgaagcaacgataaaatacgagacagactaccatccgtctaatgtcaaggctcttgccgactacacctacaacatcaacgacctggcggcgccggtgtcgagcgggtcctttaagacagacgggatgatcatcgtcccgtgtagcatgaagaccttggcagctatccattctggcttctgcgacgacctcatctcgcggacagcagacgcctgcgtgatcccccgtccaattggctggataagcaccaaatcagctggccccagcgggaccgcaaacctggccccctactcccagttcaacaacctcactttcgacccgccctataccccgtcaaatgaacgcaaagacacggtccgcaacgtcgaatccacgggccaattcgtctggaatcttgcaacgtacccgctccgtgaagcggtgaacatcaccgctgagcaggtcccgtatggcatcgacgagttcgagcgcgcaggtcttagcaaggaggatgcgaatctggttgacgtgcccatggtgaaggaatcgcctgtgaaattcgagtgcgtgtatcattcgacgatccgcttgccggggaatccgcctatggggacggtggacattatcattgggcgtgtagtgggggtgcatatcgcagatggagtgatcaatgagagggggctgttggatgtgagcaggacgcagcctattgcgcgatgcggactgcctacaaaagcctaccagaccctcacgtccgctgctcgacattag

SEQ ID NO: 27859 - DNA, 930 bp, Emericella nidulans
gccgctaagatcgatgctcccgctgctgcccctgctccccagctgtctgggcttcagctctattccagattcgccttcgctggtgctgtctgctgctccatcacccacggtgctctcactcccgtcgatgtcgtcaagaccagaatccagcttgaccccgtcacatacaaccgtggtatgatcggtgtcattgccaacgagggtgctggcgctctccttaccggtttcggtcccaccgctgccggttacttcctccagggtgctttcaagttcggcggttacgagttcttcaagcagcagtggattaaccagctcggttacgagtctgcctccaagaaccgcactgccatctacctcgcctcttccgctaccgctgaattcttcgccgacattgccctctgccctctggaagctactcgtatccgtcttgtctctcagcctgagttcgccagcggtcttttgagcggtttctccaagatcctcaagaacgagggtgtcggtgctttctactctggtttcggtcccatcctcttcaagcaggtcccctacaccatggccaagttcgtcgctttcgagaagttctctgaggctatctacggcgttgtcgacaagaacaccctctctgatggtggcaagactgttgtcaaccttggttctggtctccttgctggtttcgccgctgccatcgtctcccagcccgctgacaccatgctgagcaagatcaacaagacccagggtctccctggtgagggtaccaccacccgcctcatcaagatcgccaaggaacttggtctcaagggttccttctctggtatcggtgctcgtctcttcatgattggtaccatcactgccggtcagtttgccatctacggagacatcaagcgtttgctcggtgccaccggtggtgttgagattgctccctccaaatag

SEQ ID NO: 27860 - DNA, 1251 bp, Emericella nidulans
gaaggcaaatcgaataagtccacaagagatcaagtgagccaggctgatatcaagggcgaaagtagggaggacttgatgaatcctgagcccatgagcagcgataataaatcactgaaactatcgacggagaaaaacctttcaagggagcaggaggaacaggcccccaaaaaagaagaacccaaaccactaaatgcagagaccgtgcaacaaattcccaagcatacatcgagagtcgttcaggcgtaccgcatgaacgaatgggccaagcatctaacgaatgctgatgtgcctgacccagagcccatccaacagttcgaagaccaggaccccgaccaaaccgaagaagcggccgcaccagtcaacgtgtcagagttgctgcaaacgccactgaatgcgcagccacttccagctgtcgaatcccggagagatacaaacgagagccatcacgcacatgactcccgtacgggttcgcagaagacgaaaaaacgatctagctcacccaaacggctctctggacaatctgctgggtcagggcatttatcccagaatttgcactctgcagtgcaaccactaggcatcattgccacaccgtcctcagtcacgctgctgccacccgccgaacagggcctcaatgagagcgagaaagccaaaccacgctggaaggggccgacgcctctcatggccgtgcgggaggacatgatgcgtagtcgcctgtcatcactctccctcccaaccgacccatatgcgcgccgtagcactggtcaatcccccaccgatttctcatcgcggtatcgttcgggctcgaccttcgcgatacccgaactggacgacgatgatgttcccctgtctcagcgccgggcaatgctccacgaacaagcgaccccggtttcaccaacgaacgccgcgccgtcgagggcaaactccccagctgtcctggcagcttggcgggagtttgtcagggaagacctcgggaagcgcgatccgctaaaactttcccaatcaacgtccctgataccgggggctcgcagcgcgtcaccgttcggccagccggggcaacgtaacactccttccgtcagtctcggtgacaagatcgctgaggggatgcagcgggaccagacggcacacaccactggctcctctctctgccaccagcctcccatcgccggcaaaaacggtccagtcacgcgcattccgcgaaatctctttcatatcactgcccagattaacagagctgcgctatcgaccctctag

SEQ ID NO: 27861 - DNA, 1524 bp, Emericella nidulans
aaagtctgcccgtacaaagccctctcggtgcttgagagtcttggcctcaacgctctgtcctacaagacctgtccagctacagcatcagtctccgcctgctccacctccctcaagacctccgtccacgacccttcgtccccagcctaccacatctcgcaagcaaactactggcgcgttgacaacacccaattctatccctcctgcattgttcagccacgctcagcgtccgacctttccacagccctctccgtactagtctcaaccaacgacaatacgccgcaatgccggtttgccatccgcgccggcgggcatagcacgctcgtcggtgggacgaatgtcgagtatggggtcaccatcgatctctcggtgctgaataggacggtctacgatgaagagaagcgcattgcgtcgattgagccgggagccaggtggaaggacgtttatggggctcttgcgaagtacggggtcggtgttgccggtggacggggagggacggtaggcgtaggcgggtttctggtgggtggagggaattcgcatcatagcgcactgtttggattcgcttgtgattctgtggtcaatttcgagatcgtcctccccaacggcaccctcaccaccgcaaacagcacccataacccgcgcctttttagagctctcaaaggcggctccggcaatttcggaatagtaacgcgcttcgacatggagacgttcccgcagccgcgcaactccatatggggtgggatcgtcacatacgagcacgacgagaccaacgtcaatgcccagatcaaagccttgattgatttcacagcgaacgtcaagaacgacccctacgcctcgttgattccactgtacacgtacatctcgacgatggacagaccagtcatcgtcaactcactcgtttacacgaaaccctatgcggacccgtatccggatgcgtttaagccattttatctgctgtcgaatatctctgacacgacccggcagacagaccttgaggggttggttggagagttagagccggagagtgggctgcatagtaacttcttcacggtgacgtttgcgaatgacgcagcgatcttgaagaaggcggttgagatccaggaacgactgattaggcaggtcagaaagattgcgaaaagcagcgagtggaatatcaagagtctgtatcagccgttgccgggtttgtttgcggaaattgggacgaagaaagggggcaatgtgctgggtttggatgagaggagggattcagtagtggacctcctttggcttacctgggatcatatcgacgatacggcgctgtttgactgggttggagagacatttatgagtgagctggatgacttcgcgcggtctgttggaggcgaatatccctatgtctatctcaactatgcggccgagtcgcagaatccgctgcggagttatggagaggagaatctcgaattcctcaaggctgtggcaaaggagtatgatcctcatggcattttccagacgcaacttcatggggggttcaaagttactttggcgtag

SEQ ID NO: 27862 - DNA, 894 bp, Emericella nidulans
caacccaacaaagtcccattcctctacaatttctctccctcagtcgtgcctccaccgttggattttccggattgggtccgtataaccgggtattggtttctgagtgaaagttccgactggacgcctccgagagcgctcgcggagttcattcagtgcgctcgacaagacgggaagaagattgtttatatcggctttggatcgattgttgtttctgacccgtcggccttaacacgaacagttgtcgagtcagtacagaaagccgatgtgcgctgcatcctttccaaagggtggtcggcccgtctcggggacccgactagcacgaaggtagaaattccgctgccacctgaaattcaccagattcaatctgccccccacgactggctcttctcgcagatcgacgccgctgctcatcacggtggtgcgggaactacaggcgcaagccttcgtgccggcgtacccaccattattaagcccttctttggtgaccaattcttcttcggcaaccgggtagaagatctgggtgtcggtatatgtatgaagaagctaaatgtcagcgtgttctctcgcgcgctctggacagctactcatgacgagcgtatgattgtgagggcgaaacaacttggggagcggatacgaagtgaggacggtgtggcgactgccattcaggctatatatcgtgacctcgagtacgccacaaccctaacccgacagcgctcaagtatttcaagcacgccattttcgccaacgccctcaacaaagacatcggatgatcaaaacgcgaacgacgacattgccgacattgaggattggaccttcattggagacgagtctgatctggaatttccgaggcgagcgcgagaaagagcggtgtctggtgccgacaatatacgctga

SEQ ID NO: 27863 - DNA, 2316 bp, Emericella nidulans
gttctgaatcatgccccgttactgaccttagccgccctgatcaagatgagcgagctatcctcggaagctactacttcggtagcccacgatcaattacaagctgtatctaacggattatcaaaggtggtggttcagttgtggctccaggatcttccgtcggtagcgaaggtttttcgtataattatttcaaagctggagggtgtcttgcaccggggaaatcaattagggacttttgaaggaaatactgttgtatccccagacgactatgcggagtgcaactaccttttcgagacgatccacaacgttctgggggcacttaatcataacggatgggtttctcttcttacgcaaacgatggcgcataacagcaggcggcacgacgcttctgcttcagaggacaatgccgaagccccaagcctccactcagttgtttttcaggcttcgctgaagattgtgagtggctacaagtctggtactgcaactgcgaacgcagaggaggtcaaattgcagcagatatctctcctagtcatgcgccaacttctgctgggaccaggtgtcgaggagctagtggaatccggaattgactcacttcttgtcgaccggctttattctatgcttgacgagggtggagatattgcaatccaagcggcattgatcgatacgctcctcgctgtgctaaaggctcgcttttcccaagcttatttaccgccgcctcctacaaaacctaagcaccaaagagggggctctcgcgagaaattgaccagtccctctcttctctccttcacaagcgacaagccagagaaatcatccgtgctgctgccgtcccctgagcctcctcaacgcctgttggattgcctgctcaaaggcctcagctctccaagatccagggcgataatcgacaaatggatcatgctgctttgtgaaatactcccaatctattctacgtgcatcttccaaattctgctgactttggtggattgcctgggaagggagattagacagtcatacacgaatctccagtccgcattcgaaaagacagaaggttggcccaaagatcgtcccgagcagaccactatatccctcctgactggttttgagacgtgtattgcagctgctcatgagcgccttctcatggaagaagtaaatgcgccggcagccaagagtccggatcaaacccatggcttcttcgggaatatggtttcgggtgtcttcgcgtctgattctaaccatccacgctctgcggcgatgaacaacagacttactgttctattgtcgtttcaagacgccatcctcccgcggctagttgagtttgctgccatcttgggcgtaaaacttgagaacacgaactttggcgaagatcgtcggatgagaaaggagttgggggtttggaagaaggatgtggctgatgctttcaatgatccccggtttttcgggtcgcaactcgacctggtaaagggcggctggatgactcttttgcggcaatgggccttggttgacaaagaccgactgtctgagataatgactcgcctaaccccgccggccacagctggcataatgttcggcgttggtgcatccgcagctcgtttggatgctgatcgtaaagcccaactaaatcttcgtcggataagtcttttggtgttatctacagctgaggactattttatcgcagagatgccggcgctactgcagaagctggaggatcttcttggagctaccgcttcatcatctccatcttccgctacaagagcggaaatcttcatggtcctccgagcactcatactgaagagcacaacaaccacgctgagcccattctggccgttaataaacagtgagcttcaagaagctatttcagctatctcatctggaaaccagcaggagttgtacaatccatattctttgctccaggcctgcaagcttctggacacattgcttgttcttgcgcctgacgatttccaattacttgaatggctctatgttactgatactgtcgacgctatataccccccagagcaattcgaacccacggcgctcgcagatgaggtatctcacaacttaggggtccgttggtccacgtcatctgatccaacccgagaatcgaccaatctccaccatggcgtaaggtatccaggtctggcggcggactggatacgtgaaaccgccaaagatgagattgtcgatcgagttctccggccattctttgaccaactcagcatccatgcgtttgagagcacctacagcatcagcaatccgaacttggaagcatgccgtgatgatctgctggcagatttgttcaacgaaagtaccatggcaaactag

SEQ ID NO: 27864 - DNA, 1680 bp, Emericella nidulans
tcagtcagtggcccttgcgcctgggtgtcgacgataccatcaccagccgctgctcacccatcttcaatcacgagttcctgggcttccgtctcctggaatagcgagccagccttgacgaaatcgagagcggacttatcagctctatccggacttgggaaaacagtaggcgagccagacaaagctccccctacggaaatgcagccggctgcatttaaggctgagaatgccttttcgacacagccggctgcaggatcttccaactcagtgcagtactcaggggtagacgtactctcgaagggactggaaaaccgaaatacaaacgcacacagcgactcatcattgacggcgaaccctgagagacagaatgccgatattcaaggttcgagcgagtctcagacaaatgatgagttgtcatccaaagttaagtcggaagaggtccatgaggatgaaaaggaccacggcgaggccaacgcagggtcatctgatgatgacggatcaatcgccgacgaaaagaagtcatcgcaggatgttaagctggacaagaagaaaatgaagcggttcaggctcacgcataatcaaacgcgctttttgatgagcgaattcactcgacaggcgcatccggatgctgcgcacagagaaagactgtcaagggagatcccagggctcaccccacgtcaggtccaggtctggtttcagaatagacgggcaaaactcaagcggctcaccagcaacgatcgggaacggatgttgaagtcacgagcgctcccagatgactttgatacgactcaagtcttgcgtaccccttttggcagtaaaggtccttcggaagcatcggtagagtcactccgccttgctctttatactcagactaaagtgtcccagggtcttcttactgaaggtttaccgcgcctgaacgacgacgattacgttatctctccattgagctcagcctctacaagcggtcccggctacccaccgacctcgtccgacaggggcttcgagaactaccagaaccgaggagcggcagcaacggttccagatctgagaagcagccgagccaactttccctttccgcgatcgagtagtttctctgagccgtctttcaatacaagtcttcaataccccggtcgtttctcgaggcctggggatgcggtgggccacccagggatttcataccgacggccaatggattatgtgatgaaccggccagcgaacggcatgatggttggctatggtcagcatcgtccattggagggttctgtgtcgccgagtggtcagcaagaagcacaactgacatatggaatggataacactaaccaaatacacaattaccagcctccgctttcgatgcctgctccaaaatcatacggcggaattgaaatgaactcgcacatgcatcaccccgggcgaagtatgcccaccttacagcacctaccggtttcggaaacacccgactatcgcccctatccctacgaacaccacccttacagcatgggcactgggattccattcacccaggccaatgcctctagcctgagcctcccggcatctttctcttccgaacaggggcacgttgccgttagcagccccgcggatgacaggatgacgacgtctccgcaggtcatggatcccctgagggccaaatacagtcagggatacgactatgccaactacttatag

SEQ ID NO: 27865 - DNA, 819 bp, Emericella nidulans
acagttctgacgtctcctctccgaattcccattcccgtcacggacgttgcctccttcgtcttttcttcgggcacgcctacaacccgccaaaccccgcagtactttgatgcctccaacccatccaagaacttcagccttgcgcaacagagagtgctcgtgaaacagattgcaaaggggttagaagaccttggtctgcagccaaacgataaagtgctgctgtactcgcacaatgctctcttcttcccggtcctcctgtggggggttcttgcaggaagatgtgtctttacggccgtagcggggggtgcgagtgttaaggtgtttctgaggggttttatgaccaagggtattgatcatgcagaggtcgaatatcagttgcgcaattcagatgcaaagctcatccttgcgggttcgactcaggtccctgttgcgctggatgcggcatccagaccttggacgaggatctggaggcctgctgatgaggttcgctcttggtcatggaagaggattcaaacgctcaaagaagctcaagagacgactgcaataatcaactactctagcgggtgtggccaaacatactactgcctcaacgcggcccgcctaggcgcaaaagtcttcatcatgaaatcctttaatgtcgaccaatacctcctctacatggatatttaccgcatcaatttcatggcctccgttccagccatcatggccacgctcgcaaaacagccaaatacctcgagatataaccttcgcgcagtggaaatcgtaaccagcggctctgcaccgctgagtgccgaactcggcggtataattgagaaactctaa

SEQ ID NO: 27866 - DNA, 882 bp, Emericella nidulans
gccacgtccactgcttttaatgcggcaaaccatggcctccaaatcggaaacaactcgggttccatcacagcagaattccatgtggcgcgggcgtacaccaccgaagacattgatcgaatttgtctccatgctctgcgctgcccggactcactggctgtgaagaatcgcctgaaagagagcaaggacaggttggtttaccaatccattcagtggattcttgaagatgcgcagtacaaagattgggaaaatggggatgacgtcggcctgctttggatcaagggaggcgctgggaaggggaagaccatgttgtcaatcggtctgatcgaacagcttgcccgtgcgcaggatgactccaccgtggtgatttattctttctgccagaatgccgactacgagctcaatacattggaagccattctcaaggggttgattctgcagctggcgaatcggcaaccagagctgaaagaatcgctccgtcgccggtgggacactatacaggagtctttcagcgaggatgtaacctcgtggcaatcgttgtggaacattcttttcgaaatgttggcccggtgcaagtactctagggtatatatggttgttgatgcgctcgatgaatgtcaggataacgacatggttgattttctcaaatccatcgtgcgaaagggactggatcagcctggtaaggtcaagtggatgttgacaagccgaccatgggacggcgcagagcgggtgttattagctggtcaggaccaggtgcaaatcaatctggatggggaacacaattcccaatctgtatctggggctgtggaggcttatatcacttccaaagtggaggagcttagtcgccagcacaaatatggagcgaccctgaagagcgaaatatag

SEQ ID NO: 27867 - DNA, 1476 bp, Emericella nidulans
agtggaggcatgactgattggcaagagcagtgcgacgaggcgagaccgatctgcaagcgatgcattaagggaaaccgcgtgtgtggtggttatcgcaatcttaatgacagaaaaaagaccagcaagcgttctgggcagattcaggagacgtctcgagacttctcaatgaccaagttgctggcggattccttagcaccccctgctagaatctctggccataccctcatccaggaacgcgacaaactgtgtgcacttatagagcaggtcgcccgtcttccgcaggggcagggtctgcacggtggcttgctaacagccattccgcctattcttgctagcttggggcagcccataatcgcatcgtcaccactcccatctgcattgtcggcgttgttcttgaccctcgtctcagacaagcacaatgaaaaggaccggggcgccatcaccgaggcgatggcaagctacggcagagcacttcagctcactcgtcgattgatggagcatctgaatgaggagaggagaagagagcttatcatgactatttttgttctcggaatgtacgaggctgagttggatgctgatggttattggcaggacatgaacagcgaggatcatatcagactcacttccaactctcatcttgaaggagcaatggcttttctccttcacgcaggcctattagcggaaaagaaaaccgactttttaaatctctacaactccacccttctcattatccacttgcaactccggcatcttgagagagatgcccggctaacattccctgctaattgcgccgtcgccatcgccgctgccacaaaagcccaggacctcctcgaagccataatatccctcgattatcaaatggctgagtggccgagcacactcctctcagaatctagatacatcacggtacagctatcgccagatgacagcatagatctttggagcaggactgcatatatttatccgacactttcagcgggggatgactggtcacagtaccgcatgcttcgaatcctagctcacagtctgcgtctgcgagcgtatggcctcctcgcaaatcccttatacgctcacggtctcggacttgaagacacgcagctaaccaagatagcccggggtgtagcgacagcccggagtgggattcgtgcgctagcgaatgacatttgtgcgtcattgccgtaccatctaggctataaaaccggaccaggatctgggcggcgctatccgaatgactccttccctgacgaaaaatacgcgcgtcgtctatcagcgttgcaaataagttgggcgctgtatgtggcggggatcggggaaggtgtagatgctgcgcagaggctctggatctcgcgtcagctggacatcatcaaccgcgaaatggagatcggaaaggccgccgtgctagcagagcttgtcagaaaagttgctgttctggaagctcagaacacgaatcctgtctatcttacctcatcgtactaa

SEQ ID NO: 27868 - DNA, 804 bp, Emericella nidulans
ttgcaagtgaaacttcatctgggaagtcctcagtctatcaagggcccaagggggatggagaaacaggccgatctctcgaagggatccaagctgatgagcgccagcgtcttctttatcccctctaaccccaatgccgccactgctctagcaacggtaacggagcgcctaaccgcgctctttgccgatgaggcaacccccgtctcacggtgggccctagagcacaagctgatgcgcgacacaccgtcctgtcttccaaactcaggcacacaacgcccaggagcaccgaaatatatgcagtttctctctcttacgtaccatcccaaccacggattcatctacacttcccagcaggcagataaggatggaccaggagcagtagcagctcctaccccatccagctcacagtcatcccaggcgacgcctgtgacaacgccaatggtgatgacaacagttccgcttccatcaaccggggcgctgtatcagcatttctcatatgcttgtcagccgttttggtgccatagacacacggtcacagtgccaaatggggtagtctacgaaatcggcgatttcagagagttttgggggaaattggagatcgagggcgcaagagaggcgatccttgtcccggatgtggggaaagaggttaaggagcgattacgaaagctgaaacagccggacaagcagggtgttagccatgttgtaaatgaggatggcagtgggttacaggtggatgaagatcccgatccggatgctggggtggatgtggcaaggcagttcatggagatctttagattcaaccgatga

SEQ ID NO: 27869 - DNA, 1056 bp, Emericella nidulans
agtcaagtatttgctctgaaacgagaacactgtaggtattgcattgccgaaccaagcgagtacctcgtgctcacaggagccggtattgcagacattgagatctgcaagaaggcctgggtgtggccgtggcagcgggtacagtcaacaaatatgcagttcgatcagaaagtgttgaccaactgcactgcagcaacagaagacctaaatacgccaactacaagaaatcatgtccaagatatcgttaagggtatcatcgagggtgaaacccgggtcattgtttcgagtatgactatggaggagatcttcaaggagcgccagatctttaagtcaaaggtcatcagcaatgtccagaatgagcttgaacaattcggactgaaaatatacaatgccaacgttaaagaactccaagataccaagggcagcgagtattttgctttcctaagccgaaaagcccaagagggagccttgaaccaagcgaagatcgacgttgcagaggcccgcatgagaggtgagatcggcgaggctgaaaagaagggacgaacaaaacaagaaatatcgaagattgatgcagagactgcggtcctagagacgaaacgcaaggccgaaaaggctaaggccgactcggagcttttgaaccgtcagacagagcttgactcccaagtggagatgggtaagatcattgcaaagcgccagactgaatcgagagatgcagagctgcagaaacaggttgagaccaaacgggcagagacagagctcgagcgcctcagggctaagcaggtcacaaagatctaccgctcctgcaaagatgatgatgccatgttcaacacgaagaaacgtgaagctgaaggagtcatggaaatggccaaggcttatggtgcccttattgatgtcctcgggggccctgatgccttccttcagtggaagatgattgagactggcatgtacgagagactggctctggcaaacggtcaagccatccaaggccttcaaccaaagatcaccacatggaataccggaggcaagtggccaaggctcttcaccattggaccccactaa

SEQ ID NO: 27870 - DNA, 879 bp, Emericella nidulans
gctgacagcatccagaccgcacgtttttggacttctgataccatctatacagatatcactgtcgatattctcctgcacacagcatggcagatacgcgccgacgccagaatcatagctgcgatccctgtcgcaagggcaagcgacgctgtgatgccccgccactctgctattcccgcaaatgcagaagatgcggccaacgtgcagtcagacgcaccttttccgtgggatctagccatccccggtgatttcagcatgggccaacagctcgagaaacctctcagtccgctcagttttcaagcagtccttcttccgccccatagcccgaacacggatgacctcattcgcgagctggaagagcagactacggatccggactcggttaccgatactaatagtgtacaacaggtcgctcaagatggatcgctatggtctgatcggcagtcgccgctactgcctgagaacagtctgtgcatggcctcagacagcacagcacggcgatatgcccgttccacaatgacgaagaatctgatgcgaatctaccacgatagtatggagaatgcactgtcctgctggctgacagagcacaattgtccatactccgaccagatcagctacctgccgcccaagcagcgggcggaatggggcccgaactggtcaaacaggatgtgcatccgggtgtgccggctagatcgcgtatctacctcattacgcgggcgcgccctgagtgcggaagaggacaaagccgcagcccgagccctgcatctggcgatcgtagcttttgcgtcgcaatggacgcagcatgcgcagaggggggctgggctaaatgttcctgcagacatagccgccgatgagaggtcatccggagaacgcctggaatga

SEQ ID NO: 27871 - DNA, 1014 bp, Emericella nidulans
cccgtcccatatccttttaagttcaccacccccgaccagccaacctcctcctgcaatggcgaaataacctccctaacgatccaactcgagaatgtccgtggccgaatcccctctgcacaagcatcgcgccttcggacgatgatgttggaagcgcataacgatcccagcaagatcatcgctcacgcctgctcatacgacgggctgtcatcgcgtcttgttgaagaagccggtttccctattgtgtttttggccggctacacagtggccagtagctttggtctaccagatacagggtacattgcaatggaggatcagtgcaagagaatccaagaagtggtgcgcctggtcaaagttcctgtcatggcagacggggataccggttacggaggtcccatgaatgtcaaaagaacagttgagtcattcgcagctgcaggcgctgctggtattatgattgaggaccagacctggcccaagcgatgcggacatacaaagggcaagtccgtcgttacccgtggtgaagcctacgcccgtatccaggcagctgtcgacgcccgcaacgaggggcaggacatcttcattcttgcccggaccgatgccctgatacacggctgggacgaagccctaacccgtgccaaggagtttaagcgcatcggtgtcgacgcggtctttgtcgaggccctgccggatagggagtcaatgcggcggtgtgtccaggatgttggcattcctacttttgccaatatcattgaaggtggtaagacagaaaatatctcggccaagaatctcgccgagcttggtttctgcgctgtagcatatccttggacgctggtcgccgctacggttaagagtatccgcgagacgctggacgccctgaagaagagtatgactgaaggggcaccgccaatgattttgagctatgcagaggtctgtgagggggttggcttcaacaagtactgggaacgtgagacccggtacgagtacaatcaggatggtctagtcaatccgcccaactga

SEQ ID NO: 27872 - DNA, 828 bp, Emericella nidulans
cagagcgctacagacggcctccagccatacagctctatggccggcaaactcgaccagaagctgcttcaagccctcaacgtgctgggcttcgagtacatgtcgcccgtgcagcagcgagtcctcacagagcttcccacatggcgcaggactgtctcgtgcaggcaaaaacaggcaccgagccaggtcaggagagggcaagtggcgatcctcatcatcacgccaaccagagagctcgcacagcagatcgccaagtcatgcgatgagcttacctcacagctttcaagaccgctggaatgtcatattgctgttggtgggaccgcgcgagcgtccgcgcactcgcggttcatgaacggggacccgtccattcttgtagctacacctgggcggctgaaggattacctctctgagtctgagactgcagagaagctcaaggatatccagaccctcgttctggatgaagcggacacgatgctcgagaccgggttcctggcggacgtcaagcagatcctcaagctgatcccgtcaaagagcaccggttggcaagccactctaccaccaaaggtcaaggatgtggtcagcgttgtcttgaatccagggtacaccagcatttcgacagtggacaagaacgaaccgcccacccacgagcgcgtgcctcagtactatgtccttatgccctccgtagccgaaacattcacgaccctctcctccctcttggcccacgagtccaagaagaataccaagatcatcgtcttcggcgtcacagccaacatggtcgagctttctcacagcgccttcgccaacggcctcacgccgcttaaggctctttga

SEQ ID NO: 27873 - DNA, 1050 bp, Emericella nidulans
gcgactgtgacactacagacaccctctgctccgactgcaaatggacagttagcagacacccatgatacggtgcaggacccaaccgagtcatcgccagctcaagaaacctcaactgaaccccccaagctcaatgggacacaagacacgacagccgagcacgaggacggcgatatgccagcagcttcaaatactgagttggaagactacaggccacaatcagatacccagcagcaaccggctgcagtcactgccgcacgtcgtcgttatttcaatcgtattatcacaagttgtgtacttcagctgctcatgattgagacagtccatgaattattctccaacgataaggtttacgcacaaatacccagccacgagcttttacggcttatgggtctgctgaagaagagctatcagttcgcgaaaaagttcaacgaagacaaagagttgcgaatgcaactttggcggcaaggattcatgaagtcgccgcccaatcttctcaaacaggagagtggaagtgctgctacttacgtccacattttgttcaggatgtaccatgacgagcgcgaagagaggaagagcagccgtagtgaaacagaagcggctttgattcccctctgcgtcgacatcattagcgggttcgttcgacttgatgaagactcacagcatcgtaacatagtggcttggcgccctgttgttgtggacgttatcgaaggttacacaaactttcccgccgagggcttcgacaagcacatagacacattctatccccttgctgtcgatttgcttggccgcgagctgaactcggagattcgtctcgaaattcaaggcttgttccagcggatcggagaggcgagattaggtctaccagtccgcccacgcccacacccgttagtccccgacattctgtatcggagcatccatctcgcaagcatagcgtcggccggcgctgactggttttcttctcttatatccgctttagacggctcctatattcagtttccattcttgctctacatcgcttcccttttggatatccttgttccctctccgtga

SEQ ID NO: 27874 - DNA, 1503 bp, Emericella nidulans
aatggccacgtcgaacctgctgcactgccagcgcatcgcgcatccacggattccgaaaccgagcagccgccgcgattcgacgagcagcaggcgctaagcacgctggacgttgcgtgcctcattatcaacaagatgatagggggaggcatattcgtgtcgccgaggatagttgcccacttgactggcaacaagctcatcgctttgtccctctggatttttggaggaatatccaagattttccccgtgcctcctctgcttttcgccagcgccttcgcatgggttttcatcgcatccgcaacacccacctccaactcagttacgtttgcgcgctatatcaacccgaccaaggatggccaacccgatgtctggttcaccaagttcttcgcgtgcgtgatcgtggtgggaatatgcgcggtacactatcgactcgtgaacatcggtatctgggcgaacgactgcctggcggtatacaaggtcctgttcttgctggtgctggtcctagccgggttcgtggaaacctgtcgccagggagctgacggcggcttgctgggactcggagactatgccacgactcacggaagcccttcgccaactaacgttgcgctggctatcctccaggttctgtacagttaccagggctgggaaaacgccagtgcgtcaagcttcttctcgccgtacttacttggtcgactaacgtggtgcacagactatgtgacatcggagatcaagggggcaggagagcataagaaacgaaggttgaagcgcggtgcgttcatcgcgatcagtattgtcatgtttctctatatctccttcaacatgtttgtggttttccgaacaagccataccaagatggcgagccacgcgatctacgtcaacattgcattggccgccgctggaaacatcatcggagtcacctttagcaatgccagggtgaaccgcgatattgcgaagcatcgcattatcccattctacaagttcttctccaaaagttccaagtatgggagtacccagtgggacaacctgggcactccgactggtggtctgatcctccaagctctggttacctgcataaccattgcatcctacgagccatacaggaccaaccttacaatgtacacgtatggccatgccgtggtgtgctgcgcgcttggtattggggtcttctttattcgaaagcgaatgaaccagtacgagacaagttccactgacccagcagacaagacatatggcaaccactggaagtaccaggtaatgaagtcaagccagctccgctacacagccaccatcttcttcatagtcgtcaacctgttccttgtcgttgtcccgtttataccctcggataaccccgacggaacccccagagatacaccctcgtgggtgcagccggtcatcgtcactgctctttacgctttgggagcctcagtttcgctttatattatcaccttcgtagaggatctcaaattccgcggcagcaggtacaacgttcacgatccagcgacttga

SEQ ID NO: 27875 - DNA, 906 bp, Emericella nidulans
gccgccgacacctttaattcaaaccctggcagcccagggccgagcgttcagaacgtatacattgactacgggcagcattacagccacaacttgaacgattcctccgctcatttaataatacaacgtctccgtcgcgagctcgacgactccctcctacgcattgatcgcgatacagacgtcatcagtggccttcatgataaggttacgagcctggaggagctggtcaagaaacagcaaatcactatcaatactcagagcaagacgatttctgatcctaggtctctgagaaagcagcattcacagattcaggtgcacgtgcagtctcccatggctctactagcgtttccaacgactctgatgcggatgtctgagatttttggccatgcgcatgcgagtctgccaaatgtcttcatggatagccacatggacgaccatgtcaaggactacctcatggcaatatcgaggggaactaaagcatctgaccttcttgggaacgcggcgacacggggtttcttcgtcgcaaaagccataaactggtatctagtcgagaaaatcctcaacgcttctgttactagtggcttcgacgcggctgctgatttagaaatcaatcagattcaagagcaaatgacttccaccacgcacatagcaaagctcaccaagaaatccggattcacagagtacaaccagcaaaagatttacaaccatcttcacacactctgggcatatattgggcctctcggacacgacgcagccaaccaaaacggcccaatgtggaatgaccttcacgcgatagtgtcggaagcgcagtctcttgctattgacatgtactccatgcctctggagtataagttcgagttccctgaacagaacgagccgtttgatccacataccatgatcaacccgtga

SEQ ID NO: 27876 - DNA, 1077 bp, Emericella nidulans
aagaaagccaaccacgactcagcctccatgaccgaggtcgaggacattgaggggaaacctgtcgttgcccatgagacgctcgtggcaggctatgttcctggcacagaggaggagaagcggatcatgtacctccttagctacatggaccgaacaaagtacattgacccttccagcacccctctggatgaaaggcagctgacaagtgagtacagtatcggcaacgccaaagttgccggcatggaaaccgaccttaaacttacttcgaaccgctattcaatcgccctcgttgtcttctttatcggctacgtgatctttgaggtaccctccaatatgctcctctcaaagatcaagcccaacatctacctgccttgcatcatgtttgcctggggctgtgtcactatcggcatggcgtacgtgcagacgtacaaggcgctcattggattccgagtcgctatgggcgttctagaagccggtttcgcaccgggcgtgttactggtgatcagctcttggtacaaaaagtccgaacagagtaagaggtttgctgccatcgtcggctcgtccacgctctcttacttctacccaaccctcgtctccgggctcgggtacaagggcaacatggcccaatacatggtcatccccatctacgccgcggcctttgtgtgcaacgcgataaccggctactttgcggaccgacaccagtccaggcgcgggtacgttctcgtcgcaatgatgagcgtcgccatgatctgcagtatcgtcatctgcgtcgtttacgacctcaaggcgcgctatgcgctccttgtgattatggcaatgggactgtgggcatcaaacggactctccttggcgtatgcgtccgtgagctttggcgagatgccgagagaagtcaggggcatttcgttggcgcttgtcaatgcgatgggcaacctggcacagatttatggcgcatacctgtttccggacaacgataagccgaagtatcttatgggtttcggggttattagcgggctgtgctttacgggtgttgtgagctatctggcgttgcagctcttttcgacaaggaagagatctccctag

SEQ ID NO: 27877 - DNA, 828 bp, Emericella nidulans
gttgaggccattgttggatggggtgatccggccaggaaatggtgggccagcggcgttggcgatttgcgaacaaaagtctttctcgtcatgggcaaatcagacccggcgaacccgaacaaatacaagcaacagaccgtgatcgcggtgccatctgatactccgggaattacgatcaagcgtatgctgtccgtattgggctatgacgatgctcctcacggccacggacatgtgttctttgacaatgtgcgggtgcataagagcaacgtcattctaggcgaaggtcgcggtttcaggggggtccaaggccgtctcggccctggtcgaatccaccacgcaatgagatcagtaggagcggcagaaaaggccctcgaatattttctcgcgcgggtaaatgaccctcgcaagaggccttttggtaagcagctaagcgagcacggaattatgctggagcgtattgccaggtcgcgcatcgagatcgacgctgcccgtcttgcagtactcaatgctgccatcatgattgaccagggagatgccaaacacgctctcaaggagattgctgaagtcaaggtgcaagttcctcggatgttgcaggagattatagaccgtgcgatacaggcatatggcgccggtggcgtgtcgcaggacacaccattggctaacatgagctcaggggaatttaatgacaaagagatttcgcgtcaaaccaatcaaatgggctcgccgatctgcgagggcatctatcgattcgtggcggttggaggctgttggaggcccgcaaacaaggccaaaatggccaaaatcagatgcggatacaaatcaaaaatataa

SEQ ID NO: 27878 - DNA, 1266 bp, Emericella nidulans
cagtaccgaatgtacaggaactcgacagaccaaaatagcgaattgggctggtacacaaagcccgactaccggactatgtctgtgcagatcctcgaggacaaaatcaagttggtagagggcttgattacggatctccaggatggagggattgggtttcgaaaccacactgcgccaaaagcaaccctaaagtacggcgcatcctggacggaggatattctcttcatcgagccagagacggaatgtgtgccattgaacctgagtattcatgcgataacaccaccgtcgaactttaacggacggtttctggagaacttttcgctcgtggacgatggtggctttgcggatctatcacggacagcgccccccgggagcactgcaactgccattgaacagggtgaactcgatctgaaagaccgggcatacagggctgcttggctgaataaccactatacgatggtattcttgaatatcaccgatggtgactcgcagactcaaacccgggtggactcagtccacggccagcgaatcgatctaggggatgggaagaacaacaacttcagtatcaccttttcagcaatccaaaccaatcttaattatggggcctctggatttcagaaccgcattacgctggttgcctgcggtctcgtactcggcgctgccacgcgaaccgatggaggcgataataggatcctggatcctggcacgccgtggaccatcccgctgtactcctgcgccacagcaataaaagcacttgtcaagacagtcgagttccaatataacggaacggggttcgacgcactaaaagtgagctcattcaagcccaaggagtataaaaccccggcctccctgcctacctggggcgtcgaggacctaccagagcacgatatcgacacagctccgccgatgtgggggctccttagccctaacccaaacgtaactgcactcacccactacaatatcacgaccatctctgctgcgagtatacacctcccaggctacatgaccccggagtacccgctactgcgcggactcaactctgttcccttgggcagcgggcagaatctccccggtgtagacttctataaccaagctcttatgacggcatacactgttggcgcgcaaggattcgaaaatccggaagctgattattctggcgggcacagcttagcgctatatgctaagtggcaggggctaagtaaaacggtcgatggagcagcgaaaattatcgacctcgtctggacggatgcgcaacgaatgctgtcgtag

SEQ ID NO: 27879 - DNA, 915 bp, Emericella nidulans
gaagatgcccacgctgccgttctagatctccaagcgaaacaatcaggctctaacgaccaaccgaccgatcccgacaggcgccttgctttcttcggagtatacgatggccacggtggagacaaagttgctctgttcgcgggggagaatgtccataagattgtcgcgaagcaggagacctttttaaaaggcgatattgaacaggccctgaaggatggatttctcgctactgatcgggctatcctagaagatcctaagtatgaggaggaagtttccggctgcactgccgctgtcagtatcatctcgaagaaaaagatctgggtggcaaatgctggtgattcacgttccgttttgggtgtcaagggtcgtgcaaagcctctctcgtttgaccacaagccacagaatgaaggcgagaaggctcgtatcagcgctgcgggcggcttcgtcgactttggccgggttaatggcaacctcgccctgtcgcgtgccattggagattttgagtttaagaagagccctgaactatcgcctgaacagcagatcgttactgcctacccagacgttacagtccacgagctcacggaggacgatgaattcttagtaatcgcttgcgatggaatctgggattgccagtcttcccaagccgtggtcgaattcgttcacggcggtatcgcggccaagcaggatctctatcggatttgtgaaaacatgatggacaactgtctcgcttccaacagtgagactggtggagttggctgtgacaacatgacaatggtcattataggtctcctcaatggaaaaactaaggaagagtggtacaaccagatcgcggagcgggttgctaacggcgacggcccttgtgctccgcccgaatacggcaagtctctcgaggaacccacggcctccaatccctactga

SEQ ID NO: 27880 - DNA, 1452 bp, Emericella nidulans
ccgtactgggctcaaaccttttctacaggctaccgagacagcaccggccagttgaacgtaacctctagccagtcctctgccatcgtctcaatcctctcggccggaacattcttcggtgccctgggtgccgcgcctgtgggcgacatcatcggacgtcgttggggcctcattgcgtcaaacggtgtctttgtgctgggtgttgtcctacagacgattgccacctccatcccgccgttcctcgcaggtcgcttctttgccggattggggaccgcaccgaaatggatccgcggattcatcgtgggctcctaccagttctccataaccatcggcctccttcttgcctcagttctcaacaacgcaacccaccaccgcaacgactcgggctcctaccgcatcccaatcgccgtacaatttgcctggtccatcatcctcgtcggaggcatgcttatcctccccgaaacccctcggtacctgatcaagcgcgacgacaccaaagccgctgctctttccctctcgaagctccgccgtctcccgcaagaccacgagtccatccgccaggaactgtcggagatccaagctaaccaccagttcgaagtcagcctgggcaagtccgggtacgccgagtgtttccgggggagcctcctgaagcgtttgctcacggggtgtggcctgcaagcgctgcagcagctgaccggtatcaatttcatcttctactacgggacgcagttcttcaagaactccggattcaagaacgagtttgtcatcacgcttatcacgaactgtgtgaatgtgggctcgacgatccccggtctgtacgccatcgataaatggggtaggaggcctgtgcttcttacgggggcgattgggatggctgtgtctcagttgcttgttgccgtcctgggaacgacgacgactggccaggatgctcaggggaatattattgtgcacaatgctgcggcgcaaaaggccgcgattgcgtttatctgtctctacatcttcttctttgcggcttcgtgggggccaattgcttgggtcgtaacaggcgaaatcttccccctcaaaacccgcgcaaagtctctctccatgacgaccgccacaaactggctcctaaactgggcactgagcttcgcaaccccgtacttggtaaactacggtgacggaaacgcaaacctacagtccaagatcttcttcatctggttcggctgctgcttcctctgtattgggtttgtgtactttatgatctatgagacgaaggggcttacccttgaagaggtggatgagctttatcttgaggttaagagcgcgagggaaagcgtcacgtggagtccgaaggggacttttgcgagagttgcggagaaggggaatggtagtgcaggtattctagagcgcaccgagaagggggatgttggggggcatagggagattggcgcgcctgatggggtgtcggtctag

SEQ ID NO: 27881 - DNA, 1218 bp, Emericella nidulans
gaagttgggctggtttttctaccggcgggagtcgggtcgttggtgtccgcgacatttaatggagctctcgtggattggaattatcggaggctcttctgctcactcgtgatcttcatctacggcctggtgctggaccgacaccctccccttgcactctccctggccatgatcttcctggtttcattctccattacagcctcctacaacgtgatgaacgtcctcttggtggacctgtactactccacgccggcaacggtcatggccacgaataactttgtccggtgctttttgggcgcgatagtcaagatgttctttgaaagagtcgtctatctcacgtctctgttccttgcggcccttgcgcagataaaccccctgccatccggaatgcccatccttgagcttcgatacccagacacaccatgggtactccccgggactacgcttgccatgtcggagctaggcagccctggtaaagggcgctacggcaaacacccggcggagtatattgccccccaacccccgcccaacacccatcaccgatacgtctaccttgcgttcgagcaacatgagcaatacacgtttccggattgtttcgcgcatatctttccaaaaacgatggacgcaagggctggtttcgacttgcgccagttcgtagaggttactggtctccaacgtcccgtggccgggaactatttcttcgtcaacaatgaccacgctgtgacggggacgtcaagcacgcccaccacgactccaacgacaacgtggcatgaaccatgcgtgctcttcgccagcaacagagcgaacacccagttttcaaggggcttgtgggcacaccatgtgaaacacaacatcgactgtatttacagtatatctcgtcgtcttggccgaccggctaaaaagagagatccgcatcttgattccacaggccagaatgacggacctctgagtaaaaaggcacggggtcccaagaagaagaaagtcaaggaagaacctatggcagatttcaccgcgaatgatttgtctcttgacggtgatgacaagccactttttgacaccctcacattcgaacaaagccaaatcgatgatatgtccgtcgaaagcgcgagtttgcagacccccactttgatggaaatagtcacagcggcacccttctcaagtcagtccacccagtaccctgataacctcttggctgatcatgctttcttcagtgtcagataa

SEQ ID NO: 27882 - DNA, 1551 bp, Emericella nidulans
gcgcagaaatacgctaaagaccaaccctccggttttactaatcgcattgagcgcgtcgctgtcgtcggcgccggtggttccgtcggaaagcgtatcaccaacgagcttctgaagaccggcaaacacaccgtcaccgcactgagccgcaaagacagcaacaccccgctccctgacggcgtcaaggtcgtgcgtgtcgactatgatgatgaagaagaagaagccatcactgccgccctcaagggccaacagttcctgatcatcactcttgcagttaatgcggcgccagacacagagtcaaagatcatccgcgccgctggcgccgctggagtcccctatataatgccgaacacgtacgggggcgacgtcacgaacgaaaagtttatgaaagaaatcgttattggtggcagctacttgaaggcatgtgctgaggtggaagcggctggcgccgcgtggatcgcactcgcttgcgggttctggtacgagcacagccttaccacgggcgaggggtggttcgggttcgactttgcgaagaagagggtcactttcttcgatgatggtaagacaaagattaatgtcagcacttgggagcagtgcgggcgtgctgtggccggactccttagcctcaaggaattgcctgaagatgagaacgatagttcccccgcgctgaccaattgggccaacaaaccggtgtttgtggatagcttcctcgtgagccagcgcgagatgttcgacagctggctgcgggtttcgggagacaaggcagaagactggacgatttcttacgagcccgcaaaggcgaggtgggaaagaggtatggagatgctgaagaagggcgactactccggcataagcttgacgatgtacggaagggcgtttcttaatggggatggcaactactcgaaggaccaccagcttgtaaatgacctgttcgggctgccgaaggaggatctggatgagaggactgctgttgcaaagggcatgatggatcgggagaaccttaccatcatgaacttccctgggacgagcggctcttccgccgcaaacatgaccggcttcggaggcatgggagccggcggtacgcaggggatgtcggaacaagagcaggctatggtaaagatgatgcaaaacgctatggaatcttgtcccctcaagactgtcatctccggcgtaatgggattcggtcttggtggtcttttcggcatgttcatggcgggtatgtcctacgactcctcgcttaccccccagagccaaaccatcgccaacctcccttggcgccaacaactcaagcacggcttcaaggatatggggtcgcgctcctggtcatctgctaagaattttggtatcgtcggcgcgctctactcagggacagagtgctgcatcgagggacttcgcgcgaagaacgacctcacaaacagtgtgtcggcgggttgtatcaccggtgggatcttgggtgccaaagcaggcccgcaggctgcagctctcggctgtgcaggctttgccgcgttcagcgcggcaattgatgcctatatgagaatgccggagtctgattga

SEQ ID NO: 27883 - DNA, 1086 bp, Emericella nidulans
gctggcttgctcgagactatcatgcctgggtcaagacgcatcatgatggtgaagaccattgcaaagcgaacaaatgcgaatctggtgttcggacacgatttgggactactctgtctattctttactgctcacattcacatgctgtctctaaacattgcaatggagccgccatccaacagccagactgaatcagccgctggctcgccgtcaatttcggaagagacaaagcgaaagcataggaagcgaaggaatggacgcacaagggtttcaaaggcatgccattacgatcactgtgggcagccgctgtcccctgcctcgacggcaccatcacgaccgcaatccacccttccaggggaggcatatgacgaaaattcgcgacgaatggaacagctggttagaggctttctgtcgagaagtccacccacagtatccgttcttgcaccttccgacattaaacgttgccaggtgtcgctggtgcttgtctgtctggcgattgggtgttactgcaaaagttcttattcgagcaatttcaagggttcctgtcctggcggctggggcatctattcaaccgccattgatgtctacggcaacatgatgaaaaccgcaacaaatccttcgacggggctactttttacgcaaacgattgtgctcatgagatggggctacttgcgtctcctgatcagtctcaaggcgctcaaacgatcgaaagagtcagacctccctgacagtcaagcaagtcggtttacctgtctgcatctgattgaggagattctcttggctctcaattcactgccacatgagtttccaaagtatacatttcccatcctccactattggaatagtgtggtgagcattggactcgagatggttgctgaagaacccttgcttcgccaattctatggcggaacaatactcgaagccgtcatctccctccgcgaattttattcaaaaacatggctgtcgagccagatgagccaaaacatcctccgtatgagctatgccgcccgctcaatttttgccgacgaaatcgctgaacgcgagggttttctggatcaacccgaggcctctcaagtcaaaggaacatga

SEQ ID NO: 27884 - DNA, 1107 bp, Emericella nidulans
catcgcatgggaaaggtccaggaactgaagcgaaatctgcgccctgtcgccgcactcagttttgcgtcggtcttacaggcgacctgggaggcaccgacatccggcggacagtaccactgggtctccgagttcgcatcgccgcgataccagaaattcctcagctaccttacagttccaactgaccatgccgcccaaccaggctggatgtccgtcctcgcctggcaagccggttctgcatcgggctccttcctcacgggtacgatcatccagggcctgatcacgatccgcaatccggactacagccctgaaagctggcacggaacgctgttcgtatttgcaatgatctttgtcatctacgtcttcaatgtctacgcctctgacgccatgcccgtgcttaataacctcctcatgatattccacgtgctatcgtggtgcgttatactcatcgtgctctgggccatggcgccccatcggaccgccaagtcagtgttcacagaatggtcaacccagggaggttccgacgcaacagcccacatgtctgaagaagtcagcaatgccggccgcaatgtccctctcgccatagcctggggctacttcaccaatggcatcatggccatcgtcctgctgatagcatatctcttttcaatcccctctgtcgaggacgcactttctgacgaaacggggttcccgtttctttatgtattcagaaatgccgtctccacggcgggcgtcaatgggctgacatcgatcatcttgatcccggtgatcttcagcaacatcttcttcaacgcctcgacgtcccgtcagacctttgctttcgcgcgagacaggggtctcccattcgcagactggattgcgcacgttgataagcggcgcaagatccccgtgaatgcgattttcctctcctgtcttatcagctgcttattatcgcttatcaatattggctctgaaacggcgttcaacgccattatctcgctcaatgtcgcggccttgatgtacagctacatcatctcgatcagctgcgtcatctacaggaagctaaaatgccccgagacctgccggctcgacgatgggatatgggctcttgggggttaccggtcaacataa

SEQ ID NO: 27885 - DNA, 966 bp, Emericella nidulans
gctaccgccgaacctcaccacctttttcacgctcctattgctgatcattcgttctcatccgacaaatcagttcttgccgttgcccgagagaacaatgtggagctttaccaaaagacaggcagcaagttctccctgaccgatgagctgaagggccacgagaagaccgtcaccagcgtggatatcgcacccaactcgggtcgcattgttacttgctcgcaggaccgcaacgcctacgtttgggagcagacccccacaggatggaaacccacgctggtactacttcgaatcaaccgggctgcaacttttgtgcgttggtcgccatctgagcagaagtttgctgttggatctggtgcccgcgttattgctgtatgctactttgaggaggagaacgactggtggatttccaagcacctgaaaaaacccattcggagcaccatcaccacactggcttggcatccgaactctgttctccttgcagcaggctcaactgactctcatgcgagagtcttttccagcttcatcaagggcgtcgatacgcgcccggagccgagtgcttggggagagagacttccctttaacaccatctgtggcgaatttctaaacgactctgccggttggattcacggcgtgtgcttctccccaagtggaaacgcgcttgcattcaccgggcatgatagcagtgtcactatcgtgtatcctagtgcccccgagcagcctccccgcgccatgctgaatatttcgacacgtcttcttccattcaacagtttgatctggaatggagagaacgaaattatcgccgctggccatacgcaggccgacacgcagctcaagaccgttcatcaaaacaccatcaacacaattagagtctatgaggataccgctggctccgtgcacaaaataagcacatatactgactgctgcctagcaagcggagttgacggccgtgtcgtcatctggaccatctga

SEQ ID NO: 27886 - DNA, 813 bp, Emericella nidulans
tacacccttgttcacttcttcaacgacagactgagagagtggtcctacccggccggcctggacgagttctccggccggatcgaggatgtcaggacaccgttgctgttccagccgggagagggatgggagtatggggtcggtatcgactgggcaggtattgcactggagcgggcaaccggtctgagtctgaacgagtacctccagcgccatattttccagccgttgggaatcaagcacatgtcaatgatcccaaccgaggagatgcggtcaaaactggcgtatatgaaccaccgagaccacgacggcactctccggcctcgagaccacctccttcgagcaccacttgttgtcaacctcggcaacgaagctgaggtgaaacggctcttcaacagcggcggcgcagggatgtttgcgaagccgcaggagtactgcagaactcgcctccttctccccagtacggttgagaccatgttcagcaatcagatcccccatatgcccaactacagtcgacaaccgatcccagcatcgaagcctgacctgacgaacccgatccccgaactgtatcctgtccctggaaacccgccgcagggatggggactgacgtttatgctcagtaacggcggtgcgacgggacggtcaactgcgacggcacattgggctggactggcgaacctgtggtggtgggcggaccgggagaaaggagtggcaggaatggtttgttcacagatactgccatttgtggatctgaatgtgttgcagctttggggaggtgttgaggctgaggtttataaagctcttgatggaacgaattag

SEQ ID NO: 27887 - DNA, 1014 bp, Emericella nidulans
cctcctccgccccataatggcccgttcggcggtcccgagtcggcccatgattcggtaccgcagcctcgtcggcttgttctttgcttcgatggcacggggaatcagtacatgggaaccgaggaggacacaaatatcgtcaaaatctatgagtcgcttgagcggcataaacccggccaatatgcctattatcagcgcgtatcgtttgccagccaccttatcgcgggctacaggttcatcatgcgctattactccactggcgaccatatctatatcttcggtttctcgcgcggcgcatacacagcccgattcctagccgagatgatccataacattggcctcctctcacgcggtaatgaagaaatggtcccattcgcctgggacacgttcagtcgctatcagagctctcgggggaacgtgccacagactgaagaagaccgcgagttagcgcggtatatgcataagttcaagacgacattttgccgtccagacgtcggcgtgcatttcctcggtctttttgactgcgtaaacagcgttggtcagttcgagataccgttcttccgcaagtcataccggtacatcgccagcccttcggcacggcatattcgtcacgctgtttcgatacacgagcgccggctaaagttcaaacctgcgttatttcatattgacccaaaggacaaagactcgatagatttgaaagaagtttggtttgctggaaaccatggcgatgtcggcggcgggtggcctctaagcaagggacagaagcacctcctatcagatatcgctcttcactggatgatacaggaagtgttaaacctgcctggctcggacagcaagctggaattcatgtcggaaaatgtagaaaacatgaaacgggttgcgactcactctttatgtagggatgaggagcccggcactgcagcgtatcaaatagcacagaagacaaacaagccgcacgataagctgcgctttggacatggcggaacgcatgtgtctgttatgctatggtggatctag

SEQ ID NO: 27888 - DNA, 1065 bp, Emericella nidulans
tccctggcagagggagatctcgccttgttgatgacgccaagccctcgaaagcctaagcgaccttctgatgccctaggtgatgaccttgcacagggacctacacaggagtctgcaaagcttagccctcccgcccaccaggatacacccccaaagaagctagtaaagctatctgaccccttatctccgcgatatccacatcagtttgaagagaacccccctctgacagtacaggagcttgttgatcgattgcaaatggagcttaggtgggaaagaaacgagagaatcaacgcagagaaagacgtcgaatttatgcagcttcaatgcatgttcaagatgtgcgcctgtcgcgagttagagaacctggagaacgaagctcaggcaaggaaacaagaaaggacagctcagacccagggagctgaggaaacgatgaaggattgcgggattcccgaagaggattctcatcaacaattgaacggcgagcctaccagaatagaacctagagataaggaggaccggcaagaacaggttcggatgcaaacgcaagaacgggattccctggaagaaactcagcaacaggatgtgcaggaagaaccccaagagagcgaatcccaagaagaagagatcacggaagaacaaacccgggaagacgaattcatggacgaagtacaagaagaagtcggtgaaccactcatcacattctcacctgttacggaatacgagaatgtgcatcaaaatcacgtcgatcatgtgaatgaaatccacaatgtcaagcgaattcccctgcgcagtggcgatgaagcctcgagtttgtccgttattgctccgggcactcccattagtcgggaacaagcattggcccagatcagagctcgacgaggtcgaactagcgaaatgaagaggtccgttagcgctagcgacgctggcttccgcgcgggcgggctgaacgtcactccggcgcggttggcgcggaggattcccggtgttcagcacgctacagatccgcgaggtgacggtgtcaagaagagtcgcagagacatgagtgctccaatgagggtgttacgataa

SEQ ID NO: 27889 - DNA, 909 bp, Emericella nidulans
gcgcacattgtttctgtggaaggattccccagcgtcattgtcgctgtttttgcctggtacacgattcctgactcaccgggaacttcggcgttccttgagccccgtcaacggatggtggctcagctgcggatgggaaacggtgccaaacctgagcatcatggccatggcaggaggttcaactggggtgaggttggaaagactctgtctgatcccaagtcctatattacagctatgcagttcatgtttttcagctgcaacgttgccttcagctctatgcccgtcttcctgcccaccattttgcatgatatgggctatacctctcaaacctcgcaagctctcagcgccccaccatacttggttgccttcatcactgtgctcgcaacagcctacctctccgaccgctcccgctcccgcagcccgtacctaataacacatgccctcatctcggcgatatcgtatctggccatcgcgctaaccggttctttccatgcgtccctctcaccctcacttcacaccgcaatccggtatatctgcgtttaccccgcaacagcaggcttcttttcggcaatcacgctgatcattacatggagcatggacaatcgtgcagcgcaagagggcaaaggtgcgagtgtggcgattctcaatgtcattggacaatgcgggccattgctgggcacgaggctctatcctgctgaagatggaccttggtatgtcaggggaatggcggtctgcgcgggatttatggctgttgttgcaattctcgcggcggtattgagggggatattgaagagagcaaacgaaaagatggcggagggtgagagggggagcgacgggacagatagagagcgggaggtgctgatcctggggagtggagggcaaaggagggaggtgttcacgtatattatgtaa

SEQ ID NO: 27890 - DNA, 1299 bp, Emericella nidulans
ccttcgggtactggaaagacggttacattgctgtcgctgattgttgcctaccagcaacactatccagagcacaggaaactcatatactgttctcgaacaatgtccgagatcgagaaagcgttagcagagctaagggagctgatgaagtttcgttctgaacaattaggatatactgaggactttcgtgctttgggcttgactagtcgaaaaaacttgtgtctgcacccatccgtcaaacgggagaaaagcggcacggtggttgacgctcgatgccgaagtttaactgccggtttcgtcaaggaaaagaaggaaaagggcgaagacgtcgagttgtgtgtatatcacgagaatctagaccttctcgagccccataacctcgtacccccgggcgtgtttacacttgatggcctgttaaactacggggagcaacataaacaatgcccttatttctctgctcggcgtatgatgccatattgcaatgttatcatttactcctaccattacctcctagacccgaagattgccgaaagggtctctaaagaattctcgaaagactgcatagtggtattcgacgaggcacacaatattgataacgtttgcattgagtcgcttagcattgatataacggaagattcattgcgaaaagccactcggggggcaaacaacctggagcggaagatccaggatgtaaagagttctgacgcagaaaagcttaataacgaatacatgaaactcgttgagggattgcgggaggctgagcaggctagagacgaagatcaattcatttcaaatcccgttcttccagacgatctgctcaaagaagctgtcccagaatttcttcgggagaattaccgcatcagggaaaatgatttcctttctttcgatgctatgcggcatgccgctcagtgtttaggtcgcgtccttcgaggcaaagacgactacggaatcatggtcctcgccgaccggcggttccaaaagaaacgaaatcaacttcccaagtggattagtcaggcgcttttggagagtgaaacgaatctcagtacggatatggcagtggcgactgcaaagaactttctgcgcaccatggctcagccgttcaaagctaaagatcaagaaggtatctccacatggagtcttgcggacttggagagacatcgtcagaaacagatacaagagcaggagagactacagcgggaaactttcgctcagggggatagaacgaacggttctcgcaacggagcgggagatgagtttgatgaaggaattgatgaggatctcatgatgttggatgcgcagtga

SEQ ID NO: 27891 - DNA, 1464 bp, Emericella nidulans
tatctcaattcagcgggacggcagaaggatacggcagagaaggaacagtggcaaaataaagctaaacatctgattgaagggaaagatgtgagtaccatattctccaacttttttcctcctcctttttcttttctttgcttttctcggggagatactgacaaccacaagattcctatctcaacctctaatgtcctactgctctccgatttatcggagtttcaggagggctccacacttgtccgggaacaagctggccttcgatcggatatatttcgatctttcactgctgccaaagatacacagggagctattagggcgttgaaaaaatacggccctgaagagcctcagctatacgtggatgcgttgacatactttacatcgagcccgaagatcctggaagaggctggtgacgagctggatgctgtcctgaagagaatctctgaggatggcctgatgtcaccactgcaagtgatccaagcactcagcaacaacgcggtcgtaactatgggaagggtcaagaagtatttaagcgacaatatcgagcgggaacgcaaggaaatatcttcaaaccgtcgcctgatatcaagctacagcactgaaactgaggcgaaaatgcaggagctagaacagctgggttccaaacccgttgtgttccaggcacgtcgatattccgatgatgacgaggaacccttcgaggagcctcctcgcgagcgaacgaaccgtgtttcagtggtaaatgataaaatgcagcatgacgcagatatccaggctcaagatgtcagccacgattctcacattaggcgactgtttgacgatgaccagcaagcgcagtctcctcccctgcagaccataacctacgaacccgaacaagtaccagacgataattatgcaattgccgcacccgacaacaaccctgaggctcatgaacttcaaaatataacaacacaaggccaatcctctcgcaccgacacccacggggtcgacataagcgactggtcgcagacagcttcatacaatatctttgactcgtcatcccacacttctcgcaacctactcaacggagcagactttgattgtgactcaaacatcacaactcgaacggaagctatgcagaatttcgaatttcgccgatggaccacaatgcagggaacgacttcgtcgccgcacgatacggaaccgttctcatcaatcatttctcctcggattccaagagcaaaaagtgacaatgccactctcaatagtgctcagctgtcgtctgttagtgttgatgaactttcactacctgtcacgatggaagcgcccaatattgagatgaagggctgtaagaagaagcaggctgtagttgcgaacgacgatgatgatgagctttctctcccacaatttcatgaagaatcacctactaaacccgaaaagcgcaacgcaggccgacccccgatagagagcgaaagtggacgacacggttag

SEQ ID NO: 27892 - DNA, 912 bp, Emericella nidulans
gctgagacagattctttcctgcacctttcccgtcctctaggccctgtcctggcggggtctgcacccacaactgctcccttgaacgttgtcatccagcctcaggaacgcgtcattggaactcttctgggaacccggtctgaggatggcaccgaggtggaaattcgtagcacgttcgctgttggacacacagagacgacagaccaggttgaggtggacatggaataccagaagcagatgcttgccctgcatctcaaggcgaatcctagggaggttcttgtgggttggtacgctacctcgtccgagctgaacaccttctccgccttgatccaaaatttctacagcggccagggcgacggcacatggcctcacccagctgttcacttgactgtctctaccgaacccggaaaagatatcgaaacccgcgcctatatctctgcgccagttggtaagagcggtttggaggccattgctgcggctcgggattcagaggagcgttccacctccctcttcaccgatattgaggccctggagcgtgcgatcgaggaggttcttggtatgattgacagggtttctcgatacgtcgagtcggtcatcgatgaggaggctcccgcctctacagcattgggccagttcctgctcaatgctcttgccttggctcccaaggttgagcctgctgatattgagcgtgactttaacaaccacatccaggacgtcctggtggtttcgtacctggcaaacaccattcgtacacagatggagctttctaaccggcttgcaactgctcaactcacccttggcggcgagtctggtaacgcagagcaaggtggtgcccagcgtaatcagcgaggcaagggaggccgtggtgggcaacagcgcaaccaagagcggggtgctgaggaaggtcgcgcatag

SEQ ID NO: 27893 - DNA, 1374 bp, Emericella nidulans
accatcccgcctctacctaagcgtgtccagacggagagagtgtcactagcgagcatgagcaagcgtcctgaggatgcgacaacccaggctggagagacttaccacgaccgctgcgaaaccgctttctttcttcgccacttttgcgaaggtcctggacaatggatggatctttgtactgatcagtcttactttagccagaacgtcgtcgcaatatctgacaagagcccactagtacgctacgcggcctgcgccttggctgcaaagcaacttggtcaaactaggcacccggaatcacacatccgacagaccaatgtccaaaggtcgatgatgaaagcgctgattgactcgaaacttggatttacctggtacggggccaaatattatgagaaggcaatccagctactggcacaacagctttctagcagggacagggggacgtactcgagattgccaggtcatgtatacggcgtggggacaaccaacggccagcccgcatgcggaaacgatgaagagaaacctccatttttccacctctgcgccacaatcccacagccagcgagggcacttgacgcgaccttttggttcttcgtcgtaaatgatatgctgaatgcctttgacctagtcgttacgcaacgtaagactcgagtagatcccgacgacattgtcctttggtgcaaaatgggccttccggttgatgcatacggcaaccttctgcccgaaactagacatgacggtctatttgaaaccattcttttcaaggctctgataaggttaatgtgccgcctggtcaatttagattttgacaatgccacaaagtggactttgatcagtgaggaatatgatcgttggcagggtgctgtgccgtcatcgttctacattcctattacctggactcctaatgggcctaaccctggagatagtatagacccttgctcgagggggaatatatcgagggagacatggttcgcgaatgacatttgtgctatgactgtggctttctatcatatgtcgcggatcattcttcttgccaaccgcccaaacagtatagccgttcggccacatggtatcgagaatggattaatagcgacatgtaatgcgcttcaacaggagctaagaaagcatgcactagagatcatggccatagtgcaagcaatgccgagcgaaagagttcaaaagtacatgctacaaccgctttatgtcgccggtcgccacttaacagatcctcaagaacgaagtgacatacttcagatgctacgaaacatgggagacgattttgggcttttcaccgactaccgtatccgggacctttgcgatgaatggggaatggagtgcaacggtatcgaccggagagatggctatggaattttgacctga

SEQ ID NO: 27894 - DNA, 927 bp, Emericella nidulans
tccaccaccaccgcgacactgacaaacccctcccccgcacaggtggcagtagcacccaatcccgagctctcgaacgagaacagtacaatcaagaacattccccagctgccacagacaaagtcttccaagcccaccgcgcgcggcaaccgcgccggaaccctcaagccacgcggcatcccgaccttcagcgatccctatgccgagcgccaatggataaaggagcacatggccgcggcattccgcgtcttcgggaagcagggattcaacgaggggatcaaccctgtgctcaaagaccacttctggatcaacccattcgggaaacacttctctgccatgaaagcgtcagaccttgtcctcgttgatgcggaagggtacgtgactgagggaggagcgcagcaagctatcaatgaagccgggttcatgatccactcggagattcataaggctcgtccggatgttatggctgcggcacatacgcacgggatttatgggaagacgtggagtatctttggcaagcccattgagatgcttacacagggtatcactcgtccgaccctttgggggttttgccaggatgcatgcaacttctacggcaaacttgctgtgtatgaagaccacggtggcgtcgccctagcccaggacgaaggacgggccattgccaaagcgttgggcaaggagaatattgcttgtatcctgcagaaccatggcctcctaacagtaggctcgaccgtggacgaagccgcctggctcttcgtcagtctcgattctgcctgccacgcgcagctgatggcggaggctgcggcggcgaacggcatcccgaaaaggatcattccggacgaagtcgcacaatatacggctgatgcggcgcagaatgcgccggagttcgatcttgtcgtcgaggagaagaacggacgggttttgcagtga

SEQ ID NO: 27895 - DNA, 957 bp, Emericella nidulans
acggagtggaaggtgaccattattcacgcagatttgaccagcgcatccctaactccggcgaacggcgacgtccaatgccagttcagccgtaagttcggtaaatggtctgcgcctttgtttattgaagacccgttcctgcgcgttcacggccttgcaccagtgttcaactacggtacggttctatcactacacaaaaccgaggcgcgacaggaggtctacgagggattgaaaggtatacctggcacagaaagccaatggcctaccccacataatgcggagttcgtcccctcgcacgaaagccaagggatgctctatatccggccgatcctcttcggctcctccgcctgcattcagctgacgcctcctgacaagtacacattctgcgtctacgttacgcccgtggccgcatacaatgggatcaaccccctagacgcgctgattttggaggggttcgaccgcgctgcgccgcgcggcacaggaagcgggaaagtcggcgggaactatgcccctgttatgaaatggagcgatcaggctagacgcgagggctatgcaataacgctgcatctggatagcgcaacacgcagcgaggtggaggagttctcgacggcggggtttgtaggcgtcaaggagaaggcagacggagacggtgtggccgtcgttgtgccagatagtgggaacgttgtcgatagtgtgactgtcaggtgcattctagcggttgcagcgaggatgggctgggcagttgaaagacgggtgatcaaatacgaggaactggcgtcattctctgaaatccttgcgtgcggcactgcagtgacggtcatcccaatcaagtcaattacatgcaagagccgcgggaatcggttcacctacctcgaagccagtgtcagcaagccaggcccgtatgcggcgaagctggcagccacacttggggatatccaaaggggcaaggtggaaacttga

SEQ ID NO: 27896 - DNA, 1131 bp, Emericella nidulans
cttctccgcggtaaggctttcaacaggctcccgggaggatctgtcgcatcgacattcgccggtattttcgagacaccgacgccgtcgtctgaaagcccacagcttgacccggttgtggccagtgaggagcatcgcagtacattaagccttatgttctggctagggatcatgttcgatacactaagcgctgcaatgtaccagcgaccactcgtggtgtcagatgaggatagccagatatcatcggcatctccaccaaggcgcggcgctgaaacgccgatcaacctagactgctgggagcccccgagacaggtcccgagcaatcaagaaaagagcgacgtatggggcgacctcttcctccgcacctcggaatctctcccagatcacgaatcccacacacaaatctctcagccagcggtccgatggccctgcacctacgaacagggcgccgccgctctctcctctgcaacgcccgtcaaagtctcctctaccagccgagtcacgcagctccaaacccatctctatagcggcgccacgatgcccagcttgaagcgagcactcagagaacgctctacgtttataatcactggacagcgaagtaccaaccatttatgcaggactgcgttgctaaccacgagctcctcccttcgcgcatccagtcttgacggtcactggcatctagccgcgatgttgctagcggacgttttggagagcatctaccgcgattcgtactctgatatcaaccacatcgaccttgtaacaaagctaaggctcgataatgcactagcagttagtgcccttgcgcgctcttcactccgaggccaggagctggacccgggcaaagcatctccgatgtatcgccatttccatgattctctgaccgaggtggcattcctggtagaaccgtggaccgtcgttcttattcactcgtttgccaaagctgcgtatatcttgctggactgtttagatctggacggccaaggaaatgcactagcggggtacctgcagctgcggcaaaattgcaactactgcattcgggcgctgcaatttctgggcaggaagtcggatatggcggcgctggttgcgaaggatttagagagaggtttgaatgggaaagttgacagctttttgtag

SEQ ID NO: 27897 - DNA, 1227 bp, Emericella nidulans
caatcccgtttcgagaacggaagaccgccgaaggatccaagcgctgtaaatcggcggtatgcggcggccatgggacgagtttatgaagtttttggcaatgatatcgatattgcggttctctatgctgatgcgctcatgaacgttacgccatgggctctctggaatctggctacaggcgcgccggcaaaaaatgcgcccacaatgctagtgaaaccggtcctagaacgggctttgttgcaagaaggcgcagataaacaccctggccttctgcatctatatattcattacatcgaaatgtctccagcgcctgactcagacaggggattagacgtcgcggacaaactccgcgaccttgtcccggatgcgggccatatccatcatatgccgacgcatctggatgttctggtcggcgactggaaaaagtcaattgagagtaactataaagcaacgcttgctgatgatcgtttgatctatgcggcgatgtttgcggggcagcagaagacagccattaacgcggtggcgcggatggagaagagtgttcctagctgggagggagtgttgagtatcaggtccccgccattggcagattgggtggagaattttcttgcgacaagagtgcatgttatgatacggtttggcatgtggagggagcttattgggatggatttgccgcataaccagcggctgttttgcgtcactacggcgacgacgcattatgccaaggggctggcgtatgcggcgatggggaatattgaaaaggcaaaacgtgagcggttcctcttccataagagcaaggcccttgttccagcctcccgacgggcatataatagcaaggccttggacacgttggctacactgcggcgatccacaaagctcgatgatcaacttccgtacagcgaaccctgggcatggatgcagccctctcgtcacgcgtatgctgctctcctgctagaacaggggccaaggcggcacccgcgcaatgtatgggcacttatcgggtacaaggagtgtttgatgcggatgtggaggctccaggaggtaaacgagattgagaaggaccttagggaagcgctagaaggggcggatatccctattcgtgcgagctgcttttgtcggttggatgcagctgagactgaggatgaagttatcccgacagatacgaagccaaggcagaggagtcacagggcttgcgggcagagggacaaggaacgaggaagtcggttgtag

SEQ ID NO: 27898 - DNA, 1341 bp, Emericella nidulans
gctgaagtcgagggcaagaccggcgtcagccagcagaaagtgcaattcgagcacgacgagctctatcaagcctacgcggccaagggagaagaatggcatagacagatgacgcgccggttgatgcgcaaggtcgatttgcatctcctgccgctgctggtcgtcatgtatctgcttaactttttggatcgcaagtacgcccccaagccctttcctggtcgaactgggtctacgccggcccgactcggcaccctagaggaagacctcggcatgtcggggactgatttcaacctggcgacgagcattctctttgtcggatacctcctcatgcagttgccctcgaatctgctcctcacacgcgtgcgaccttcactgttcctcggcattgcgatgggaatctggggcgtgatctctgcatgccaggcggccacgcagtcgtttgcaggcttagtggttgcgcggttcttcctggggtttgtggaggctcccttttttccaggcgcggtcatgttgataatcctcctccccaactatcccgccacaacgtcctggctcgatgatgaggaaaaagcctatgcgcagtggcgtctgatcaacgacgcgggcgaggcggacgatacgggcgcttcgaccatcaaggaagccctgatcgccgtgttcgctgacaagcgtatctacctattcatcctgctccaacacgcctccctcctctcgcagaccttccaatacttcttccccacgatcgtccagaccctgaactacagcaacatcgtgacgctgctgattacggcgcccgtctggatcgctactttccttgtttcgctagttgtgacctggacaagcggcaagaccaacgaccgcagtatccacatcatctgtcttatggctgtcagcatcatcgggtgtatcatctgcacagcaacgaccaacctcggcgcccggttcttcggcatgttcctgatgcccatgggcgcagtgtccgcgtaccagatcatcatcgcctgggtcgcgaattcgttcccccgtcccctggtcaagcgctcggcggctattgcgacggcgaacatgatcgggaacacagcgatctttcggggcgagcgtagcaaacaggacaagagaactggctccgcgttgcgtttcgggcagaggccatcctctgctgtacacaaagagccgttggaccgtcgtgataaatatggtgcacctccacttccaaaagagccagaagcgtctcaggtgtggaaaacagggcttccgtcatctcagccgtacttaagccacacgttcaacgcggatgaacgagcaaccagccctgaagtggggagcgagaagggtgagaactaa

SEQ ID NO: 27899 - DNA, 867 bp, Emericella nidulans
cggtggctcagcaaacttctcgctccgtactggttttcattgctcccaataagatcccatgcatggacattcgtctggcgtgatgcgcagaacaacacgcacgtccccagcggctcctctgactttccctgcaccgagattgctaacccgccgggcatggtctttgagtacgacgcagacggggattttacgactttctatgtgtatcaaaataccaactgctctggagatcccactggctgggcggagcactatcactcgaagcctgcgagtaacttccttggctcattccagattgtggacagaagaaaaacacaatccgcaacagcatcgtccaccagttccactgcatcaggggacacgcccctctcagggggtgcgattgcaggggctgtcgtcggtgcagtggctggtgtagctctcatgggggctctagtattcgtcggtgtaagacgacgaaacaataaacctgtcactactgctggttccgctatcacatcgaatggcccggcaggttcgggtgttgtccctactttgatcgaagtacaaaaagataccctacagcctgacgagcgtcctatgaaaaatgaatgggttgcggttgcaggctcggaacaaaaaccgacacgaatggcagagctaccaggggattttgaggcggttgagatgagtgatagtcaccgggtaaacgaaatcgaggcggctgttgtttggcagaagtacggcaagggaaagaggatcaccaatacccagacgcaggtatccatccatttaacggcccttgcgactcccagtcccttgcgaagactgaatgcgtcattagttaatgcgttattaagtgagcacaacagcaccatgagctcctag

SEQ ID NO: 27900 - DNA, 2178 bp, Emericella nidulans
gcggatcttcagtctatcgcccagctcctcgcagcgagcagtgaccgcacgcaaacgaaacaagggactcgcctgtctagtgcgattctcttcaagaacgttattcgacggaactggaccgatgaggatggaaactataagctcccactcgaggtagtgggtacgctgaaacaagagctcatcaacctgatgatctctgtgccacaggtgctacaaacgcaattgggagaagctgggctcgatacttatctcgaaacgaataagtcgaataaagatcaactcactcaggggtttacgcaactaaatttgatggttaagctggtttacgatctttcttgccatgatctcccgccgatgttcgaggaaaacatgagcggattagcgcaaatcctgctcaaatatctcacatatgacaatcaattgcttcatacagacgacgatgccgagtctggacaactagagtatgtccgagcggggatattcgaggtcctaacactttatgtgcaaaagtatggagatgagttccagccatacatacagcaaatgggggaaagccattggaacttccttactacaatcggacaggaaacaaaatacggcattctcattttccaagcagaaagcaccctcgctcaggttattgagaaggttgtcttgccgaacgtcagccttcgtgaatcagatgaggaacttttcgaggacgaaccgattgagtttatccggcgagatctcgagggttcagacagtgacacgaggcgacgagctgctacggatttcttgaagcaattgaatgcgaacttcgaggcatcggttacgaaggcagttttgcaatacattgaacactacctaaacgagtacgggaaatcaccacaattgaactggaaagccaaggataccgcaacttatctttttatcgcgattgcagcgaagggggttgcaactgccacacacggagtaacgaccactaacagccttatcagcattactgattttttccaaaagaacctcgctgctgacttggtttctggagatggtgtgcatccgattctcaaggttgatgctatcaagtatctttacctcttccgcagtcttatcaccaaggagcaatggcaggaaaagaaccctgctcctgagaaagtgcaggaaaatgagttcattatgaaatatactcttgagatgtttggccggccgttaattgaacaccgcaggttcgctgctccctcgaatcccgacaagcttgagcaggctctctaccctccattctctgccgttctccaggcggatatagcagaattcgttccctacatctttcagctttttgctgccctcttagaggctaatccctcaggtactttgccaacctattaccacgggctcattgctcccattctggcacctcaggtgtgggaatcaaagggcaatatccccgcgcttgtgcgactcctatcgtccatcattgctcggggctcgcagcatattctagagaacaatcaacttatcaacacgcttggtattttccaaaagttgctttcgtccaaaacgaacgaaggatacggattcgatcttctggaggctgtgattgagcactttccttcggcggcactggaaccgttcttcaaggatatcatgcaaatcatcctcactcgccttcagaatcacaagaccgagagtcttactctccgattcgtgcgcgccgattttgttatccaagtcattgataaagtacaggaaggtctatatgttcagctatacctgaacatcattctaccggaatcacaaaagctcgcgcgcccgatggaccgcaagaccgcagtgatatcatttaccaaaacactggcaaattccgaagcatttgcagtcaagtataagaagggatggggtttcacgtgcgaagctcttctcaagcttctggagcttccgcctttgccggctagcaaggacgacatcattgccgagcatgacgttgaagacatggcgttcggtgtcggattcacagctcttgtcacgatacggccccaggccagggatccttggcccgacaccggagccgacctaaagctctgggttggaaaatacctaaaggaggcggaccagagacatggggggaaaatctcaggatttgttcaagagcggttaggggagcaagccaaggcgatgctcagcagttatattgcgtga

SEQ ID NO: 27901 - DNA, 855 bp, Emericella nidulans
cacctctcccatattcttgttatgttctccaaaggaaaagaccgcttgaacagagttcaagccaagtatagaattgagaatattcccttgcccttcgtcaaacaagatattcaagcaggacaagaatggattagaggtgccatgctctgtgctctggtaacggcatcaatcggtatcttgaatgtgatcctcacaataatcgcggctggtatcgcctattcaaaaaaggcaagcgacactcacctcacatatgcagaaatctacgagggcgattgttcaatcaccagtaattggactaccggaatgcacctggttatcaacgtcctcagcagtatcctgttggccgctagcaactatgtcatgcaatgcttaagcgcaccctcgcgggttgatattgacagggctcattcgaaaggtaactggttggatatcggaaccttgagcgttcggcatctctgggtcagggatgtcaaaagcaagatactttggggcctactttgtacttacaatcgcgaattcaacactaaggcgggtaccttctacttgtcacagacagggaaaacctcggaggctcttctagccttgcttcttttgaccagatgcggggatatctgggagcccgacccgactttatatcccagtctagtgtcaacagcttttatctggagactcaacattggaattatccaatatggtctttcaaatacaagggtagtggcgactggggtgacttgtttgacctatgttataccccttggcaagggcaaaacgacgcagcctgttacgatagagctattgatacacgcacacttcaagattttctttggactgaaaatccgaccgaaatgcagttag

SEQ ID NO: 27902 - DNA, 906 bp, Emericella nidulans
gatagcaatgtttcagagctagtcgagagactagggagtgaagaggatgcagtgcgcaagatggctgtattcaaactccagagcagcattggagacccttcgtttgcagacgtattcatcgcagaagatgggctgacaaggctccgttacttgactctgcatgcgactgggaatactttggcatatagcttaacgagttttgccagactgttagaggttgataagggatgggaatgcgttgatcacgagttggttgaaagggttgttgaactcatcgtaacgcaccccttagtgaacattttgcgaggcgcaatgtctatactcgtctccatcgtttcgcatccttcctctgtcggtcgcttgtcgcaaaatgctgatctcggagttatcaaggccgtctattccttgatgcaaggcacggcgttacaggaccacgcgcaccctttaatcgaattccaatcacttacgaagatcctcctgcgcaaatggcgagatactgctttggacctcgaaaatccagagcataggagagctcttaagggcattcatcttgctagtagtcaagagaaggggaatgaaaccggcgccgatatgcgacggtcgaagaaacacagccccgaaaaatggcggcggctcggattcgaatcagagagtccagtcgcacaatttgaagatatggggtttttgggcatgatggacctggcggactacgtccgaaatcaccaagacgaatttcaaaagatgcttcttgaacagtcgacaaagccagcccggcagcgatgtccgattgcgcgcgcttcgctatccgttacatctatattatacgatcattttgaggttgacaaatgcgagactgaagatagcaaaacctacttgatacttgagtcttgttctaacttggattaa

SEQ ID NO: 27903 - DNA, 1167 bp, Emericella nidulans
gcgctcgacaactactaccgcaacaagatcgagagcatgaagctcgagattattcaagggcaagctgtactacgacgacttgaagcgcaacgcaatgattataactcgcgggtgcgcctactgcgagaggaactaggcctacttcaacagcctggctcttacgttggagaggtggtgaaagtcatgagcacaaagaaagtcttggtgaaagtacatccagagggaaaatatgttgttgacatcgcggatggcgttgacattggcaagctgaccgtcggcaagcgtgttgccctgctctcagattcatacaaactggaaaagatgctcccgtcatctgtggacccgctggttttgctcatgatggtcgaaaaggttcccgacagtacatatgatatgattggtggcctcgaccagcaaattaaggaaatcaaggaggtcattgaacttggcttgaaacaccccgagttgttcgagtctctgggaattgcacaaccgaagggagttcttctttacggcccccccggcaccggaaagaccctcctcgctcgagcggtggctcatcatacggactgcaggtttatccgtgttagcggatcagagcttgtacagaaatatattggtgaaggtagccgtatggtccgtgaattattcgtcatggcccgagagcatgcgcctagcatcattttcatggacgaaatcgacagcattgggtccagccggatagactccgcgggctcgggtgactcagaagttcaacgtaccatgctggagcttctcaatcagttagacgggttcgaaccgacgaaaaacattaagatcattatggctacaaatcgactcgatattctggaccctgcattactgcgccccggaagaattgatcgcaagatcgagtttccacctccatctgtggaagctcgtgcggatatcctacggatccattctcggtcgatgaacttgacgcgtgggatcaatcttacgaagatcgccgagaagatgaacggatgctcgggagccgaactgaagggtgtatgtacggaagccgggatgtacgcccttcgagagcggcgagtacatgttactcaagaggactttgacttggccacggccaagattctcaacaaacatgacgacaaggaggtagctgtgtcgaagttgttcaagtag

SEQ ID NO: 27904 - DNA, 960 bp, Emericella nidulans
cctcaggcgggaaagtccggaccttctccggcgagaaacaagttccaggaggaagaacctttgcgtatccctgcgtccccgaccgttcatatgcccccagcggttacgtccagtcggagctccgcctttgtcactcgcatcgagctcttcgctgccggtgtgccggattggatatctccctacgtgggcggcagttggtggctatcaagaggatacgcttctgtaacggcgggcgcttgctctactattgtcactaaccccatttgggtgataaaaacgcgactgatgtcccagagtctaaggtccacgacagaaggattccgagctccttggcaatacagcggcacttgggatgctgcccgaaagatgtacaagaatgagggcatcctctcattctattctggcctaacgccagcattgctgggactggcgcacgtggctattcaatttcctctttatgaatacctgaaaatggcttttaccggttacagcatcggagaacatcctgatactggaagttcccactgggttgggataagttgcgcaacatttctgagtaagatctgtgccagcactgtgacgtatcctcatgaggttttacggacaaggctccagacacagcaaagaactccgccatcaccttcaccagaggagattgcattccggggtggactgggtggcatggatcgtggacgtggtgcaggtgcatcttcatctgacggtatgcctaacaggcctcgctattccgggattatccgcacatgtcagacgattctacacgaggagggctggcgggcgttctactctgggattggaacgaacctatttcgagccgtccccgctgccatgaccaccatgctcacatatgagtatctccgaaaactcattgggcatatgaaacatgagggagagatgaagctcaggcttgaggaggaaaagaactccacaggggcaatataa

SEQ ID NO: 27905 - DNA, 876 bp, Emericella nidulans
tcggccttccattcgacaggggtcaatggcggcgccctgtttttcgggtatcaacaggctcaggctcggggagccgcgactgcgaggaacaagcaggcagcggagcgaaggaagagagataaggctgctaagtctgcaaagagtaaaaagggccctcgtgagttcaaacagaaggacctgaaagatgtggagcagttcgcactctgtgatgcgatgaggtaccttcgagcattcgaagtcgggcgggagccagcggtatccaaatatgaagttcacatccgactgaaaacccggcgagacggccctgtcatccgcaacatgatccgattccctcactccgtccaaaccgaatcacgaatttgcgtgatctgtccgcctggctcaaaacatgcgaaggacgcacttgcagcaggagcggtgctagtgggagaggatgaagtatttgaagtcgtgaagagcggaaggattgaattcgatcgttgccttgctcatccggacagtatgcccgcgttagctaaggctgggctgggaaggattctcggtccccggggtctgatgcctagtgcgaagaccggtaccgttgtcgaagatgtggctgctcgtgtcgaaatgcttcgtggaggtacggtgtacagggagcgtgacgctgtggtccgtctccccatcggccagctgggattttctccagagcaactacgggacaaccttcgtgttaccattgatcaagtgaaaaaggatgctgctagcctcaacgaccgaatcacaaaagaaatctacgaagttgtgctgagctcaacccacggtcctggcttcagtctgaatggagagttcaagaccgagaactctgtggatcctgccttgttgaccggtccgtaa

SEQ ID NO: 27906 - DNA, 780 bp, Emericella nidulans
gttgctgctgttttctttggtatggcatgctgcatgggtcccatcctgagcatgtgctgcaagaagttcggtgctgtgttggcggctattgcccacgcgattgctgtgatcatcttgcttgtcatctttgaagtcatgttcttcctcgaacactggtcttggccccggtgcgtcatgggcatgatcgccatggctgccattcaacgtttcgtctacaaacttattatcgcgctcgctcttacccgagagttcaagcatgaccagtcgaacatcgcatggtggactggaaaatggtacaacatgggttggcactctctctctcaaccgggccgagagttcctctgcaagatcacggagttgggctatttctcagcagacttcgtcattggtcatctcctattgttcattatgctgcccgctctttgtgttccttacattgacaagtttcactcagtcattctcttttggctccgcccaagtcggcaaattcgccctccaatctactcgcttaagcagtccaagcttcgtaagcgacgtgtggtccgtttcgctattctgtatttcgccatgcttatcctgttcctcgttctccttattgcacccctcattgccagaaatcaggatctgaacctgaaaatgagtggcatccttcttgagctcatgcagcctctcgacagcaacaacaacgacactatgaccagctataccggctcgggtgtccccaagggcatggagcctattgcgtccccgtcatcgtaccttacgaacttaaacaactaa

SEQ ID NO: 27907 - DNA, 796 bp, Emericella nidulans
cttctactggcgcggatggcccatctcggcccagtcgaactacacacataccgtgctccagcgttcacagagcgcaccgctggacacggccgaccgccggtttgcaaacacctccatcccggtgtttgttggcttggccgacaacgcaacgttgcaccatcttcccccacatggacccctgactgtccgcaaccgagagatcggcacaattaacacgatcgaggacaaccttatccagtgcagcccggtgtcttccaccgacgcgtttgaacaaggccagttcccgatctcggttgtcgatggcgccacgtcgacgcgctggcagcccagctcatccaatgctagtgcggtcactgtcaacctcggctccacgactggtcggtcagtccaaaccgtggcgtctggattccacttcgactgggcggccgcaccacccgttaacgcaagcgtgatcttccacgatacccccctgtcggatcctgtggcggcattgagctctccaggacctcatgttcggattgtggcgaacctgaccaacatcgaacagtcgggaccatacgacccagaggccacggatcttaatgaaatcaagatccccgttgggaatactacgaggatcgagcttgctcaggaggttccggttgggcggtacgcgacattggtaatctcagggaaccaggccctggcccaggcggacggagaagatcacgtgggcgcgaccgtggccgagtgggcgatcctcggcccaaagtcgggcagcccgcgacgccggatccagcctgtgcctctactgtaa

SEQ ID NO: 27908 - DNA, 800 bp, Emericella nidulans
tgagtctttctacaactggctttgggccacaggttgaactgaaccgggtgcagaccagcactagcgggtcaagacagtttaatgcaacgcaatccagatcaaggccatattcgcgacagcaagcagagcaacggcagcgacagagcgcatctcggcgacaattacaaatgagacagtctcggcctctaccaagattcgatatgaacctcgaagatctctttggcgacaaccgcgcagtcgctgagaggcaaggtagtggtggcatgggaaagctagcccaaccctaccctgtctctgagacttcggatcctaattttgcgcggccacaatcccatcgcaatccgtctatggaatattacggccctttcgagaaccccgtctcgccacagcagccccaaccacaaccgcgatactactacaacaattccccccagcagagcggatcacccggcagcgtcgttgcggccagcggtatcccaccataccaagtaacacctacagagcaggaaaacccctcgggcatgggtctcgattatctggattacgatccaacaggtatcgagcgccacgtgtccctgggatctgaagagaactcggactttaaatttcaaggcggcgcacagtcactgggccatggtgctggccataatttcgggatcgatctaggtttcggcatggccgttgattttcaacatgattggagtgaaaatgccaattatgatctacttgaggggtatttcttcggtggagcaggcgcaactggaccgggacatgggcatgggcatggctcgggtatatag

SEQ ID NO: 27909 - DNA, 774 bp, Emericella nidulans
gccgtcatggagattgccgagtatgcgcatttacaggcgcaaggcgtcgtccaaacacaagccatctttgctggacactcgctgggagagtatagcagcctcggtgcctgtacaactatcatgccttttgagtcgcttttatcgttgatcctctatagagggctcaaaatgcagaataccctgccgcgcaacgctaacgggcgtactgactatggcatggtcgctgccgatccatcgcgaatccgatcagacttcaccgaagaccgactgattgagctagtgcgacttgtcagtcaggcaactggcgtgttgctggaggtggtcaactacaacgtgcattcgcggcagtacgtatgtgccggccatgtccgctctctctgggtactcagccacgcgtgcgacgatctatcccggtcgacatcgccaaatagcccacaaaccatgagcgaatgcattgctcaccatatccccagcagctgctctgtcacgaatgaaactgaactatcccgtggccgtgcaaccattccacttgccggggttgatattccgttccactcgcagatgctacggggacatattgatggctacagacaatatctgaggcaccatctgcgggtgtctgatatcaagccggaagagctcgttggacggtggatccccaatgtaacagggaagccctttgcgttggacgcaccatatattcgattggtacaaggggtaacgcagagccggccgttactagagctgttacggcgggttgaagagaataggtag

SEQ ID NO: 27910 - DNA, 782 bp, Emericella nidulans
ggcccgtcacgaaaggaaaacttcttcgtctggcggtccaggcggtggcccgtccaaactggcttccagacctgtaccagagcgtcggcctataccacagcccacgcctcaaacagccgcggcgcaaccgacaccagcgtccagacccgttcctcaaccagtggcagccgttgcagcatcccattcacgtacttcatctactgcctccgcaagggcaccacccccgcctcctcccgcgaccacctgcagctgcaggaccgaagaaagcaaaggccctgtacgacttcagcagcgacaacaatggcatgttatcgattagcgcaggacaaattgtggaaatcgtttccaaagaaggaaacggctggtggctgtgcatgaacctcgaaacctcagcgcaaggctggacacccgaagcatatctcgaggagcaagttgcacccacgcctaaacccgcacctccacctccacctccagttgctccccgagcaagcccagcaccagtgaatggatccgccgcagttgctgcagcgaaagccaaagcggcgcctccgccccccgctaaaaggcccaacatggcaggccgtaaaacagcacctgcgcctccacctgcaccccgcgatagtgctgtcagcatgaattcgcaaggagattcttctggtgcaagtggtcgcggcaccccaagcagcgtttccaatgcatgtcttgctggtggtcttgccgaagccctgaggcgacggcagagcgcgatgcaggggaagcaggatgacgacgacgactggtga

SEQ ID NO: 27911 - DNA, 785 bp, Emericella nidulans
ctgaagttgaagtcgcgcccaaaaagagtcgtggccctcctaaggcagcccccaaggcggcagcgaagctgaaagatgaagacaaagatgaggacgagcccaaggtaaagccagtaacgaagaggggccgaccagccaaaccaaagcctaaggatgacgacagcgacggtcttgatgatgacgaatttatggaaatcgccaaagctgaagccgccaagaccgccccccctcgtgctggccgcaaggctgcacccaagtacacattggatgactcggacagtgacaacggcgatgatttgcttggcgatgtcagcaagatggttaagggcattggtggcgcagctggtggatctgccacggactcgcgacaactcttctcggaactctcgcgacctggtagcagcacgggcctgcctactaattcgaagacttccaagtttgataacgactttgatgcggacgaaaccgactacagcaagctcatccctcaaaactccccacgccgttcccttcaggttaagcctaaagacgtgaaggcgtcagagagtatcgacttggacgacgaagaggacaagcccatcaagcccgctaagactaaggctgctccaaaggccaagctgcgccagctccaaaggcaggcactggtaaaggccgcggccgtccaaagaaggatgccacggccatcgcttcttccctcaaacagacgaccctgccgccagcagccaaggcatatgcgtcgaagcaagcaaagggggcctctacagcatccaagaagaagacactga

SEQ ID NO: 27912 - DNA, 785 bp, Emericella nidulans
agattcccatcggacaaccggaacccggccaagagaacgaggaactttccgcagccctatcagatagattctccaaaccgctaaagaaacaaatctcgggtctcatccgtcgtcagcgcgaagaactattgcatcctgagctggcatccgattacgtcttccccatccttccgggcgtcctcacagaccccaatgaggaaaagcgcaaccctgtccttgaactcgtcaagctcctcatgcaggttctcagtctatccaagacgacggcgcttgaaacccgcctcctccgccgtgaattactcgccctcttcgaagtccgcgagttcagcaaagaaggccgcttcgaaaatccaggcagcagtctcaagatccccgaactcacttgcagcgcctgttgtctaattcgagacctcgatctctgccgggacgaagacgtcctccccgagcgtggctctggctctggccccgacagcgctacctcttcccgaccatggtgctgccccttctgtcaaactgagtatgaccgcctcgcacaggaggagatgctcatcggccaggtttggggaatggtcgttgcgtggcagacgcaggacctcaagtgctcgaagtgtgggactctaaagatcagcgagtttatggagcattgctcgtgtagtgggcagtggacagagacaatgaatcgggctgatatagaaaagcgcctgaaggttttggaaagtgtggcgaagttccatgagttgaagttgctacaggtggttgttgaggaggttctgtcccagacatga

SEQ ID NO: 27913 - DNA, 788 bp, Emericella nidulans
acttcatatttgccgcgccaggtggcattggccaggtccaggccctcttcattgaacggcgcgacatttacgacgctcgtgagaagaaatcacgaattttctcctgggtgggtttcgtcacaggcctcattgtctctgaactcccctacctcgtcctctgcgctgttctctacttcgtctgcttttactaccagaccggcttgcccacgtcctctgacaaagccggagccgtcttcttcgtcatgcttctctacgagggtctctacacaggtatcggccagttcatctccgcttacgctccgaacgccgtcttcgccactcttacgaacccgctcgtcatcggaactctcgtctctttctgtggtgtccttgttccctatggccaaatccaggagttctggcgctactggatctactggctcaaccccttcaactacctcatgggttcgctgctcacattcaccattttcgatgtcgatattaaatgccgtgagtcggagttcgctaccttcgatccgcccaatggctcatcttgcatcgattacctgtcgactatcttcaagggttggggcgtcagcgcgaacctgatcaacccggacgcaacctcccaatgccaggtctgccagtatactcgcggaagcgactatctgtatagcctgaacctgaaggactactactatggttggcgggatacggcgatagtcgcactcttcgtccttagtagttatgccttggtttacgggcttatgaagttgaggacgaaggcttcgaagaaggcagaggagtag

SEQ ID NO: 27914 - DNA, 791 bp, Emericella nidulans
gcactttgactgccccctgcttacttcctgaccttaatcgcatagcaaaggttgaagttctcagtcctgattactggcccttggtcctagattttgactccaacccgggagtgcgcgagaaattccagcagggcgaccaatccatttacctacgacgcaaagcaacctacaatccaacaggctcatccttcttctcttccacactggccgggctaagcagcgcgcaagacatcctcccatcagcttcgacctcggcttccaaccagggcaagggtctatcgccatccgccctcccgaacgtctccgcgctcctttccaaagaatcccacagatttacaccaaaacctgcagcacaaagcatttgggactggatcttccagttagattctttgcatggcatcctagacgcgcgtgagaaggagctcgtcctcccatcctcattcccggcacgaccacgtccgtcttccacgccccacgatgcgccctggctccgtcaatccgctgtggatagcaagcttcttgccgaaagcatcgcgcaaaacgttatacaatcggccaccggccgcggcggtaacccggacgaagtacgagaccggctttggcagctgaggctgcttttcgcttggattgatgctggctcttccttcccgtctgagagcgacgaggagaagcgggacagacaggaaactggatccatgccttcaagcgggcactggctaaggagggactatgttgaggacttgaggtggaagatttggggcgttcaggctaggggttctgaaggctcttag

SEQ ID NO: 27915 - DNA, 791 bp, Emericella nidulans
cgcttttcatggtctgcgcactttttgcgccgcttgtgaatcagataatgcccctctttatcacccaacgctccctctacgaagtccgcgagcgacccagcaaagctattcctggaaagcttcctgattgcaacatcctcgttgagatcccctaccaggtcttgatgggtattctaaccttcgtctgctactactacccgttgtcggttccagccaaggaccagaccgagagggcgctcgtcctcctcttctgcatccaattttacgtttatgccagcactttcgcacacatgtgcattgcagcgatgccgaacgccgaaacagctagtcccatcgtcatcctcctcttcagtatgtgtcttaccttctgcggtgttatgcagccgcccgacgcacttccaggcttctggattttcatgtaccgcgtctcgccgtttacctactgggtagccgggatggcaaccacccaagttcacgggcgagaagttgtctgcggcgagaatgagctctcaatcttcgatcccccgacgaatcagacttgcggccaatatatggagaggtacatcagtgtcgctggtggccaggtactgaacccgtctgcgacggcgggttgcgagtattgttctctgactgtggcggatgagtatttggcagcgagccagatatactggagcgatcgttggaggaactttgggttgatctgggtgtatattgggtttaatatctttgttgcgacggcagtatattacctgttccgcgtgaagaaatggaatggacggaggaagaagtga

SEQ ID NO: 27916 - DNA, 793 bp, Emericella nidulans
cccaatccgttcaatacagaccgatggcatcaaggcattcttgctgaattcgtgcggtttcggacagaaggaggcgcagcttgtgggtgttcatcctcgatactttttgggtctactctcagagccagagttcgaagaatacagaacccgacggcaacttcgcatcgcaggagctgaacgagcctatatcagcgcgatgatgacaaattccattgtctgcgtgcagtcacaccctccctttggtcccgcagagatgcactccatcctactggatccttctgctcgtatatgcctggattcatccaccaattcctaccgcgtcacaaaagcgtccactccagtttatacgggcttccagaggcctcacgacaaacgtgaagatcctcgtccgtcaacgatcggcgtcgataccgtaaccttgagcagtttcaatgcgcacgagaacgccatcttcctgcagcgcaactacaccgagcgcgaacgccagtccctgcaactacagagccatcgcagcttccggtccgcagtcgcgagtggctggtgcgccaaagaagccgttttcaaatgcttacagacggtatccaagggcgcaggggcggcgatgagcgagatcgagattgtgcgcgtacaaggggctccgtctgtgttacacggcgatgcacttgctgcagcgcaaaaggctggtttggataatatccagctaagtctgagctatggtgatgattgtgtggtcgcggttgctttaggtgtacgcaagtggtgtctttggccgttggcctctatcatccgttaa

SEQ ID NO: 27917 - DNA, 793 bp, Emericella nidulans
taagaacgtgcaccttgccccctcctggctgcagagtctcgagaaacgcctcgcctccctcaaaccccacaaggatttccgcctgtttctctccatggaatccagccccaagatccccgttaacctcatccgcgcctctcgcgtccttatgtacgagcagccggctggtgtacgcggaaacatgaaagactcgctctcgtccctctcaactcgtgccagcaaagctcccgttgagaaggcccgcgtctacctcctcctctgcttcctccacgccgtcgtgcaagaacgactccgctacgcacccagcctcggctggaagggcttctgggaattcaacgacagcgactatgagtgctcggccaatataatcgaccactgggtgcacgtcgtcgcacagggccgctcaaatgtcgcaccacaaaaacttccctgggacatgatccgcactctcatcacagaaatgtacggcggtaaagtcgacgatagcgacgacttccagcagcttgagcgcctggtccacagcttccttacccctgccacctttgaggccgactacaagctcgtcgaaggcgtcgagaatgacgagtgtcttatcctccctggggaaacgggtctgcctgcatttgtggagtgggtgaataagttgcctgagcgtgagccgcccacttatctgggtctgcccgctaatgccgagaaactattacttgttggtcatggaaagaagatgatttcggatttggcgaggattacgagcttgttggatgaaggggagcagcttatgattgatgcttag

SEQ ID NO: 27918 - DNA, 794 bp, Emericella nidulans
tctttgcgaagttggctgcgttcttacaggagtggaagaaatcaaaagagaagaacatcgccttggaggaagctagaaggcgcactgaagcatctttggctcgcaagcgcatcaatgtcggccttgcgaatggcgcaggcgcggcaggagatgccccagtttccccagccacaagcggagccatggattcgctgctggagaaattacgtgctgctgcccctcaagccaaggatcagcgtgaccgtcgccgccgtgcgagattaaaggagcggcaccaagttcgagttgcctcagggcagaagatcccagatctcgaaggcgccgaggccccgggcagtggcggacagaacagaggtgccactgacacaaatgctaccgactctagcctattgagtcccactatccaggaacctgaaggtggcagctcaccaattgcctcgcaaagtgaagatgttgccgaccgagcagctagcatgctacaagatatgttaagaaacagtcctgacccagaacgcacgcggaggcgtagagaaagtgcagaagaggaacgaaggaagcgccggttaaggagacgcaatggagccacaagtggaagcaaggacagcaatgataccacacctttgtcccctgtgacagaaccaacttcgacccagggcgagtcagcagaaccggaaaatttgtcactttctagccctccaaatggagaagacccgaccctaaaccctccgactattgtcttatcatctgatgcttctgacacacctgatgatgaacatcgcccctcgaccagctag

SEQ ID NO: 27919 - DNA, 796 bp, Emericella nidulans
caacaccgtcgcaaacacatcctctacagcggcttctgccagctccgacctcaacggctatgccatctataacgcctgcacccaactgaacgaacgtctcaagccctaccgtgaaaagatgcccaacgcaaccctgaaagacctcgcccacgctgcttacttcgaccgtgtcaacctttctgcccaaggctactaccgcaccccagacatcggctatacctggggtgagaacaagggtcaaatgttcttctacttcacgcagggcgttacagccgctgaagtcgaaatcgatacgctcaccggcgactggacgcccctccgggcagatatcaaaatggatgtcggccgcacaatcaacccctccatcgactacggtcagatagaaggcgcatacattcagggccagggtctcttcacaacagaagaaagcctttggcaccgcacaactggccaaatattcactaaaggtcctggaaactacaaaattccgggcttccgtgacattccgcaaatattcaacgttagtctccttaaggacgtagagtgggagaacctgcggacgatccagcgcagtagaggcgtcggcgagccaccgcttttcatgggcagcgcggcgtttttcgctattcgggatgcactgaaggctgccaggaaggagtggggggttactgatgtgctgagtcttgtcagtccggctacaccggagagaattagggttagttgtgcggatcccattattgaaagggcgagagtgaaggcggaggaaggggaaaagagcttcttcgttgcgatatag

SEQ ID NO: 27920 - DNA, 796 bp, Emericella nidulans
cagctttgccggccactccttgggtgaatattccgccctcgccgaccttgctgatgttatgctcatcgaaagtttagtctcagttgtcttttatcgcggcttgacaatgcaagttgctgttgaacgagacgaacagggtcgttcgaattattcgatgtgtgccgttaatcccagccgaatctccaaaacttttaacgaacaggctcttcagtatgtcgttgggaacatctccgagcaaacaggctggctcttggaaattgtcaactacaatgtcgcaaacatgcaatatgttgcggctggtgatcttcgggcacttgactgtctcaccaacctgctgaattacctcaaagcgcaaaatattgacattccggctcttatgcagagcatgtccttggaagacgtgaaggctcaccttgtcaacatcattcatgaatgcgtgaagcaaaccgaggcgaagcccaagcccattaaccttgagcgtggatttgctacaattcctctgaagggaatcgacgtacccttccacagtactttccttcgttctggtgtgaagccgttccgatccttcttgatcaagaagatcaacaagacaacgatcgatccaagcaaactggttgggaagtacatacccaatgtgacggcccgaccgttcgagatcaccaaggaatacttcgaggacgtataccggctcacgaactctcccaggatcgctcatatcctagcaaattgggaaaagtatgaagaaggaactgagggaggttcccgccatggcggtactactgcggcttcatcctga

SEQ ID NO: 27921 - DNA, 797 bp, Emericella nidulans
gcccacagggaacgttactggacctcgtgaaccttgtccgcaacgaagggatctccggcccggcgactggagagggaggcttagatgagtctctagccatgttcttcaccattgagctcttccgcactatccaggctctccacacctgcggcattcttcacggcgacatcaaagccgacaactgcctcatccgcttcgacgacaaaccagaccccactcagcagatactcgatgaaaacacagatccccgcgaattctactattcaccttccggcgcttttggctggaaaaacaaaggccttgcccttattgactttggccgcggtatcgacatgcgtgcattcgacccgtctgtgcagttcgttgcagattggaaaacaggggaacatgagtgccctgagatccgtgagatgagaccttggacgcaccaaattgatctttacggtcttgcggggacagttcacgttatgctttttggaaaatacattgagagcgtccctaccgatgcaagcaagaaaacgtatcggattcgcgaaccgctgaagagatactgggaaaaggatatctgggccgatgtttttgatcttcttttgaatcctagtgcggagcggtgggctcggatggagcagaaatcgaatgttaacgcctccaaccttccagtcctagtctcaatgcagcatctccgtgaacggatggaaagttggctcgttgaccatgctgagaagaaaggtttgggcttgcagatccgaaaactcgaggcaatttttgcagagaaaaagaagagattggagaagtaa

SEQ ID NO: 27922 - DNA, 797 bp, Emericella nidulans
accttggggtcttgccggatgaagcattcaccaagtacaagaatacagactctaacacggttgttaagaagctgcataaggtgaatgaggcactcaagaaatatgcccatgtcaacaagaaagcgtttgagcagtacaacaacttcaccaagcagcgagagacacttaccagtcgaagggaggaacttgacgcttcgcaaaagtctatcgatgacttgatctctgtgctggatcaccgaaaggatgaagcgattgagagaacattcaagcaggtgtctcgtgaattcgctactatctttgagaaacttgttcctgccggccgagggcgtttgatcatccaacgtaaaacagatcgtacccagcgggcggaggacgatcttgagtcagaggatgaggaagcgaagcatagcgtggagaactatgtcggagttggaatcagcgtcagtttcaacagcaagcatgacgaccagcagcgcatccaacagcttagtggagggcagaagagtctctgtgcgcttgccttggtcttcgctatccaggcttgtgacccagctccattctatcttttcgacgaaatcgacgcgaatctggacgcccagtacagaactgctgttgcacagatgctgaaaaccatttccgactccacaaacggacagtttatttgcacgaccttccgaccagagatgctgcatgtcgccgagaagtgctacggagttagcttccgacaaaaggctagtacaatcgacgtcgtgtcaagggaagaggcactcaaatttgtcgaggagcagaagtcataa

SEQ ID NO: 27923 - DNA, 798 bp, Emericella nidulans
ttgcagtctggcaagaccaccatcgcggagaacaatccctaccgtgtcagtgtcgttactgagacaaaaatcagcgaaaagagctgggtcaagacgaccatcagcctcgccgccacagaaggaaaccgaccatcctacgtcgagctcgaaagcgaagtcgaatggcaggagactatgaagttccttaaagtcgagtttcccgtcgacatcacaaacaccgaagcgtcttacgaaacccaatacggcattatcaggcgcccaactcactataacacaagctgggatatggctaaattcgaagtctgcgcacacaaatgggccgacctctccgagaacgggtacggggtctccatccttaacgactccaaatacgggttcgcaacttgcggaaacctgatgcgtctttccctcctccgagctcccaaggcgccagacgcacacgctgacatgggtcgtcatacaatccgctaccgtatcttcccacacagcggacctttagacttccggacagtccgtgctggctatgagttcaaccatccgctcatcctcgatacctcgttagctttacccgatgagcaaagtgtcaacgccgttagcgcgctcttcgtaaaattgaactaccggctctccatctttgatctcgacgttgtcaagcgcggcgaagacgatgaggatattgatggtgatcctgatatttcgcttcccagctcaaaacggagcggtcaaagtatcattctacggatctatgagagtcttggtgggaagagtaggggtgcaattcggaccgctctcctgtag

SEQ ID NO: 27924 - DNA, 798 bp, Emericella nidulans
cgcaatcttcttctcgcggtcaagacgctggagaacgtaatatcaagcttcaagacccgtgtcaaggatgtcgaacgtaacttgacaaagcaatatcaaacccttgagcacgcgtttagtttgcggatcaagaagctagaccggttggaggaaactacaatcaacatgcgcgcccagttacagactcgaaaccagacggggctctcgccagagttatccaaacttcgcggtgaaaaccgactgctgaaggccgaactcaacttacttcaaaaccacccgcgcagccgcagcacgacagctggcgtggcaggctcgccgcagtcatccactattgacctggcagaacgcggctcgctagtacgcgccaacacagcagccgaatcgcctgcaagatccagtattccccaaccggcccaaatgacaaatcttgcagaacccaccggtgctgtcactcgcccacggcaattcaaaccatcagataaccacggcaatcaagaagtatggataaagcgtctgcacgagctggaacggaggctcaaagccgaacgggaagcgcgccttttggaccgcaatggcgcacggagacgcctggaggagcgcgacgccgagaataaacggctccgtgcgcagttggaccgacagcgtctccgccaaggagtctcaacagagacttctaccgatgatggcggccatggacctccttctgaacctactaccggggacgaggggtacagggagcgggaggaagaacatagctcgagtgagggggaaggcatcacagttgatatcgaagtttga

SEQ ID NO: 27925 - DNA, 798 bp, Emericella nidulans
tttgacgtcgcgatgcagagacttggaggacgaacgatcgccatctcaactgagcactcatctaccaagaagggcgagactctgcaggacaccctccgtacactcggctgctacggagatgccgttgtcttgcgccacccagagcccagcagcaccgaggttgctgccaagttctctcccgttcctgtcattaacggtggaaacggcagtgttgagcaccccactcaggcgttccttgaccttttcaccatccgtgaggaacttggaactgttggcggtctgaccatcaccttcaccggcgacttgaagtacggccgtcctgtccactcgctcatcaagttgctccaattctacgatgtccgcgttcaactcgttgcgcccaaggatctgtccttgcctgcggacatccgccagcaactgctcgcaaccggtcagctgctcacggagtctgaggagctgactcctgaaatcgtcgcccgctctgacgttctgtactccactcgtgtgcagaaggagcgcttcgccgaccttgagcagtatgaacgcctcaagaacagtttcatcatcgacaacgctctcctcaagcacgccaagagccatatggtcgtgatgcaccctctgcctaggaatgccgaagtttctgaagaggttgacttcgaccagcgggcagcctacttccgtctggtgagtctccaatcccgtggccctagtagtgagttcgacatgctaatgtggatgcagatgagatacggtctttactgccggatggccttgattgaactgatcatggcgccttag

SEQ ID NO: 27926 - DNA, 798 bp, Emericella nidulans
gctcaagttggactcaaagcaagactcgatgatttccggatttggaagattttgctcgagctgtctacgggcctgaaacatatccacgactccgggttcattcatcttgatctcaaaccagccaatatactggttacctttgaaggtgttttgaaaattgctgatttcggcatggcaagtcggtggccagccgaagaggggattgaaggcgaaggtgatcgtgaatatatcggaccggagattctgatgggaagatatgacaagcctgcagacatcttctcactgggcttgattatattcgagattgctggtaatgtcgaacttccggacaacggcctttcgtggcagaagctcaggaacggcgacatgagtgatgtcccgagtttaacttggagctccgagaccaccgttttccgcgacgcgtcaggcaatcccatttcagaggagccatcgtttgaggaactgtgcgcgtcggactttggggacgacgattttggcacaactgatctctttggcagcaatagggaacgaaagccagtcccattcacccgtagtagtgagctcgcagaccctcccgcctttatgatcgatgccggccatgagcagtcgcttgataagatcgtgcggtggatgatctcccctgaaccgcttgatagacccacagctgatcacattctggagtcttatggagtccaatttgtcgcatcacggcgtcgagctggcgccaccgtgtacgagggcaactggggccctgccgatgatgttcttgcggaagatgccgaaatgatcgatgtttga

SEQ ID NO: 27927 - DNA, 799 bp, Emericella nidulans
aatatccaacaccagacatcgcagatatttctgggtccacccgtacacacgcacgttatactggagcgagcatgacccgcagtctgctggaaagagcgagggacggacaaagagtgtttcaattgaagctgtcagggtggtggccgacgacaacccatacccaccagggcttcactgcaagagcttggaggttgtcagccccggccgtaggatcaggttcactgccactacaagccaaagacatgagacatggttcaacgctctttcttacctgctggtacggaacggtccggaggatgaagaagcagaaaatggtgttacgctggatgacattgacgagttcaaccccggattccgctcacgctcgcgccaaacggcacgtatgtcagtttcctcgtcccagagtcgcgggacgcggggtctaccgaagcaacggtcaggctcagccatgtctttacggcccagtgtgacacctggccgtgcatccccgtaccccccgtcgcattactcggaccaggcaaggcaggcttcgtcgtctcggttgagtaccatcttcaactcgacaatcaaaggatcttttggacgaaaaggcccgtacgcggcttccagtctaaatgaagatagcatccataaccacgacgatagtgtggaagatcttcggcacatgatggacaggggcgatgatgtggaccgacttgagaatgtccgtgcctgctgcgatggcaagcacgatgtcagctcactctcgaggacgagccgctacagccctcgcgccaaccgaatccactcccatcactaa

SEQ ID NO: 27928 - DNA, 799 bp, Emericella nidulans
tgaggacgagaccgatagcatcccatcgactccggaggcatacactaccgcagatacccgggtccctgaatgccgtccaaccacttcggtagttcttcagggtcttccccagatggccaaacagatcctgttcatgctccccgacggcggcggatcggcatcttcgtacctcacaatcccgcgtctccatgccgacgtagccatcgtcgggctgaactgcccctacgcgcgagaccccgaaaacatgaactgcactcaccagtccatgatccagagcttctgcaacgaaatcaaacgtcgccagccagaaggcccataccatctcggcggctggtcctccggtggcgccttcgcctatgtaacagccgaagccctcatcaatgcaggcaacgaagtccactcgctaattataatcgacgcacctgtcccacaagtgatggaaaaacttcccacctcgttctacgagtactgcaacaacctcggtctcttctccaaccagcccggtggcacaacagacggcaccgcgcagcccccgccatatctaatcccgcatttccaggccactgtcgacgtgatgctcgactaccgtgttgcgccgctgaaaaccaaccgcatgccaaaggtaggtattatctgggcgtctgagacggtgatggacgaggacaacgcgcccaaaatgaaagggatgcactttatggtgcagaaaaggtgggattttgggccggatgggtgggatgtggtttgtccgggggcggtgtttgatattctgcgcgctgaaggggcaaatcatttacgctga

SEQ ID NO: 27929 - DNA, 799 bp, Emericella nidulans
ccacgatgttcccataactatgagcgatacgcttttcgtgaacatcgtggtttccctactttccacggtcgggctgtactttttcacttcgttcatgtatctggacccttggcatatgttcacgtcgtctgcgcagtatttcgccttgctgcccagctatatttgcacactgcagtgttatgcgttctgcaacacccacgatgtcacctggggaaccaagggtgataacacaatcaacactgacctgggtacggcgcgcatcatcaatgggtctattgtcgaggtcgagatgccatccgaacaacttgatatcgacagtggctacgatgctgcgcttcgcaacctccgagaccgtcttgaggtccccgaccctggagtgtccgaaagccagcaacaggaagactactaccgtgcagtacggacgtatatggtctccgtctggatggtcgccaacgtggttctcgccatggctgtctctgaagtgtacggtgtcggctcgagtggtacgaacgtctacctcgctatcatcttgtggtctgtcgcggttttagctatcatacgtgccataggatcaacggcgtatgcagttctgtatctgatccagaagctcgtcgagggcaaggccaagttccaagccggtaatattgcgagtgccaatgccagcgccgctgggagctcgctcgggacaaagtcgaatgtgtcttacggcagcaaaggcttgaacatgacggacaggattaacgaaactaaatgggctatttcgagagggatgcagaaggctatgttttggaagaagtga

SEQ ID NO: 27930 - DNA, 800 bp, Emericella nidulans
cttacggtgctggccctctctcggctgacagcattcctttgttagacctcgcttatgtgcgcctctatgtcgaccttggccgctgcaaggaagcattttggcaacgagattggaatgccatggctgatgaactggcccggggaacggatgtggagaacgctttagacggaattccatctgatgttttagacccctcaataacagaggacgccctttcgatggatgctcgacgcgactcaatagcgtctctgggcgtaggagagcttgcgatctcacagactccttctcaagagcatcctatgcaaccgctattaggtgcttatcgaccagggcaaaccaagcgcgagaagctcttacgcagagcagcttgttatgctgctgattcattcgccatgtccgaccagctaggaagcacttttgccgacttcacctgtcgagaactaccacttcagagcgccatgtgtacctttgattgcgctcaagtactcgctgaatggaccacgacggtgcaggaacgagtcggaccataccttggaatgctaagccgtgaagatttcgatttcgagcaagctatacaaagccagcttctcgaggatgaagactgcaagcttctgcagaagacacggagtatacttgcgagcattgaacagaagatgcaaaaggacattgcaaacactatgtctgtatcacaagggtcttcgggcgatgcggacgaaggctttggttgcaaaatattagtcgcaacggctggcctcctagacagggcttccgtatggccaggtaagatcgctcgtatgtga

SEQ ID NO: 27931 - DNA, 800 bp, Emericella nidulans
aggttatggagaagttcgattacatcgtttatcctagccgcagtatccagaccgacggtatcaaagctttctctgttacttcgtttggtttcggtcagaagggtgctcaggtcattggtattcatccgaaatacctgtatgccactctagatcgcgcacaattcgaagcatacagagccaaggtcgagactagacagaagaaggcataccgctacttccacaacggcctggtcaacaatagcatcttcgttgccaaaaacaaagctccttatgaagacgaacttcaaagcaaggtcttcctgaatcccgattaccgtgtggccgcagacaagaagacttcagagttaaaatatccacctaagccccctgttgctactgacgcaggatctgaaagtaccaaggctgtgattgagtccctggcgaaggctcacgccaccgagaactcgaaaatcggcgtcgatgttgagtctatcgatagcatcaatatctcaaatgagactttcattgagagaattttaccggccagcgaacaacaatactgccagaatgccccgtcgccgcagtcatcgtttgcgggaagatggagcgcaaaagaggctgtcttcaagtccttgggtgtctgcagtaaaggtgctggggctcccttgaaagacatcgaaatcgagaatgactctaacggggcgcctactctccatggtgttgcggccgaagctgctaaagaagctggtgtgaagcatatcagtgtcagcatcagccacagtgacatgcaggctgtcgcagtggcaatctcacagttctaa

SEQ ID NO: 27932 - DNA, 800 bp, Emericella nidulans
tcccagggtgtttctcaatgtatcgaatcaaagcacctaagggtggccagaactactgggtgccgattcttgcgaaccctgatatcgtcgaacattactcggaaaacgtcgtggacaccttgcacaagaagaacttgctgcttctgggtgaggatcgttatctgtccactctcatgcttcgaacgttccctaagcgcaagcaaatattcgttcctcaagctgtttgtaagacagtggtgcccgacaagttcatggtgctcttatcccaacgacgtcgctggatcaacagtacagtccacaacctcatggagctggtcttggttcgagacctgtgcggtacgttctgcttcagtatgcagttcgtcatcttcgttgagctggtcggaactgtcgtactccccgccgccatttctttcaccatctacgtcgttgtttcttcaatcatcaaacagcctgtccaaatcatcccgctggtcttgctcgcccttattcttggacttcctggagtcctggtcgttgtgacggctcaccgacttgtctatgtcttgtggatgcttgtatacctcatttcgctgccaatctggaacttcgtcctccctacgtacgcatactggaaattcgacgacttcagttggggcgatactcgaaagaccgctggtgagaaggacaagggccacgaagacggcgagggagaattcgacagcagtaagatcacgatgaagagatggcgcgactttgagaaaggtatgtctatgctcactgtgctacatgatgcgcggactgctaacgatatctactag

SEQ ID NO: 27933 - DNA, 800 bp, Emericella nidulans
tgtgcggtttttgctgcttcagtatgagatttgtggtcttcatcgatctcatcagtaccataatcatgcctgtcactgttgcatacattgtgtacctgattgtctggttggtgcgagacacatcaactatcccctggacttcattcctcctccttgctgcgatttacgggttacaagcaattatctttattgtccgccggaaatgggaaatgattggatggatgataatctacatccttgctattcccgtgtactccctggctctgcctctctactcattctggcacatggacgacttctcctggggtaacacgcgtatcattactggagaaaagggccgcaagatcgtcatctccgacgaaggaaaattcgaccccgcgtccatcccgaagaagaggtgggaggagtaccaggccgagctatgggaggcccagacctcgcgagacgaccggtcagagatctctggtatctcatacggcaccaagtaccaccccgccacccaatccgaatacggattccccgggtcacggcctatgtcacagcttgagctgcctcggcatatgtctcggatgtctctcgccccgtcagagatgatgagccgccacatggacatggagctggaagacgtcaacctaccgagcgacgacgcgatcctatcagagatccgtgacattctacgcacggccgacctcatgaccgttacgaagaagaatatcaagcaggagctggagaggcggtttggcgttaacctagacgcgaagcggccgtatatcaattctggtaagcatagacccatttag

SEQ ID NO: 27934 - DNA, 800 bp, Emericella nidulans
gctgcttcagtatgagatttgtggtcttcatcgatctcatcagtaccataatcatgcctgtcactgttgcatacattgtgtacctgattgtctggttggtgcgagacacatcaactatcccctggacttcattcctcctccttgctgcgatttacgggttacaagcaattatctttattgtccgccggaaatgggaaatgattggatggatgataatctacatccttgctattcccgtgtactccctggctctgcctctctactcattctggcacatggacgacttctcctggggtaacacgcgtatcattactggagaaaagggccgcaagatcgtcatctccgacgaaggaaaattcgaccccgcgtccatcccgaagaagaggtgggaggagtaccaggccgagctatgggaggcccagacctcgcgagacgaccggtcagagatctctggtatctcatacggcaccaagtaccaccccgccacccaatccgaatacggattccccgggtcacggcctatgtcacagcttgagctgcctcggcatatgtctcggatgtctctcgccccgtcagagatgatgagccgccacatggacatggagctggaagacgtcaacctaccgagcgacgacgcgatcctatcagagatccgtgacattctacgcacggccgacctcatgaccgttacgaagaagaatatcaagcaggagctggagaggcggtttggcgttaacctagacgcgaagcggccgtatatcaattctgccacggaagccgtgttatcgggcaacctgtga

SEQ ID NO: 27935 - DNA, 800 bp, Emericella nidulans
tcccagggtgtttctcaatgtatcgaatcaaagcacctaagggtggccagaactactgggttccgattcttgcgaaccctgatatcgtcgaacattactcggaaaacgtcgtggacaccttgcacaagaagaacttgctgcttctgggtgaggatcgttatctgtccactctcatgcttcgaacgttccctaagcgcaagcaaatattcgttcctcaagctgtttgtaagacagtggtgcccgacaagttcatggtgctcttatcccaacgacgtcgctggatcaacagtacagtccacaacctcatggagctggtcttggttcgagacctgtgcggtacgttctgcttcagtatgcagttcgtcatcttcgttgagctggtcggaactgtcgtactccccgccgccatttctttcaccatctacgtcgttgtttcttcaatcatcaaacagcctgtccaaatcatcccgctggtcttgctcgcccttattcttggacttcctggagtcctggtcgttgtgacggctcaccgacttgtctatgtcttgtggatgcttgtatacctcatttcgctgccaatctggaacttcgtcctccctacgtacgcatactggaaattcgacgacttcagttggggcgatactcgaaagaccgctggtgagaaggacaagggccacgaagacggcgagggagaattcgacagcagtaagatcacgatgaagagatggcgcgactttgagaaaggtatgtctatgctcactgtgctacatgatgcgcggactgctaacgatatctactag

SEQ ID NO: 27936 - DNA, 800 bp, Emericella nidulans
gcattgaatacctcaaggacgttgttctcaatgataaacttggaatagcagcagagatggagcgtcaaatgcaggagctggttgacagctacttctgcgaatggaccgagacagtcagaaatcccaaacgtcgcaagtacttccaacaattcgccaacactgacgagacggtcgagaacgtggaaattgttaaggagcgcgagcaagtgcgcccgacttactggcccaaggacggagccaacgaagacttcaagggtcaccaatggtccagcctctcgtggcagccagttatcaaggctgactacttctccgacggcccacccgcaatctcgtccgccaatatcaagcgcggtgatacccaattggccattttcaaggtcaagggcaagtactacgctacacaacaaatgtgccctcacaagcgaacctttgtcttgtccgacggtctgattggcgacgacgacaacggcaaatactgggtatcgtgtccgtaccacaagcggaacttcgaactcaacggcgagcaggctggccgttgccaaaacgatgaggcgatgaatattgccacattcccagttgaggagcgggaagatggctggatttacatgaaacttccaccagttgaggagctggattccgttcttggtacggaaaagtggaaggtgaagaagggtgaagctgtggacccgtttgaggcgtatgacaagaagtacagcgggatgaaagggaagagagccggcgccaagggaattgagggcagcaagcccactcggtctccttcaaacacaatagactggtag

SEQ ID NO: 27937 - DNA, 800 bp, Emericella nidulans
atcctaatgttttagaattgtttgttggagtaaagggcttggatgaccaagaagatccggaggacacgttgatggaccttctctactttgttgttgatattctgcaatttcagggtgagcgcaatgcgtacgatgaggtcgactttgatatgatggtcgttgagacgctcgatgccgtccgggcatatcatgaggcggccaaagaccaggccacgcagcgaccgaacaatactgtgctcgttttggacaagtctttacatttgtttccgtgggaatctctaccgtgtctacaaggactgcctgtctgccgagttccatccctggagtgtctccgtgatcgagttttgcacttgcgctccgggaaacagagcgctctcagtatcgatcgacgcaacggcacgtacattctcaaccctacgggcgacctaaagacaactcaggagactttcgagaaagatctatccagtcttaaaggctggacaggcatggtcaatcggcagcctacagaagacgaattcaaagatagccttcagtccaagagtctcttcctttactttggccacggaagcggcgcacagtacatccgcggccgaaccgtcaaacggctcgaccgatgcgctgtggcatttctcatgggctgcagcagtggcactcttaccgaagccggcgaatacgagccctacggaacgccgatgaactacctgcaggcgggatctccggcgttggtggctacgctatgggacgttacggacaaggacattgaccggttcgcgaaggcacctttgagcattgggggctga

SEQ ID NO: 27938 - DNA, 800 bp, Emericella nidulans
tcggtgaactccgtggtggttcttgggtcgttgtcgaccctaccatcaaccccgaccagatggaaatgtacgccgatgaggaggcccgtggtggtgtcctggagcccgagggtatcgttaacatcaaattccgccgcgacaagcagttggagaccatggctcgtttggaccctacttacggagaacttcgccgcgctcttcaggacaagaacctcagcaaggagaaactttccgacatcaaggacaaaatggcggcacgcgaggagcaactccttcctgtttacatgcagattgcattgcagtttgccgatctgcacgatcgtgctggccgcatgcaagccaagaacaccatccgccaagccctctcctggaagaacgctcgtcgcttcttctactggcgtgttcgccgccgtattagcgaggagtacattatcaagcgcatgctcaccgcatgccctgctcctgttcagggtgaaggcagcggagctgtcgcccagggtgtgtcgcctgcccctagcgactcccctcgcaccacccatctccgcactttgcactcatggactcccttccttgagaacgaggttgagaatgacgaccgtcgcgtcgccgtctggtatgaggagaacaaggagcttatccaggagaagattgaagctctcaagtctcaagccatcgcttcccagatctccgacgtcctcttcagcaaccgcgaaagcggcctcaagggcattcagcaggctctcagcttcctccctgttgaagagaaagagtccattctcaaatacctcggatccaactag

SEQ ID NO: 27939 - DNA, 747 bp, Emericella nidulans
cctcgcaaatttttcgttggcggtaacttcaagatgaacggtaatgccgagagcactacctccatcatcaagaacctcaactctgccaacctggataagtccgtcgaagttgtcgtctctcctcctgcgctctacctactccaggcccgcgaggtcgccaacaaggagattggagttgctgcccagaacgtcttcgacaagcccaatggtgctttcaccggtgagatcagcgtccagcagcttcgcgaggccaacatcgactggaccatccttggacacagtgagcgccgcgttatcctcaaggagactgatgagttcattgctcgcaagactaaggctgccattgagggtggcctgcaagtgattttctgcatcggtgagacgcttgaggagcgtgaggccaacaagaccatcgatgtagtcactcgtcagctcaacgcggcggctaaggagctctccaaggagcagtgggccaaggttgtcatcgcctacgagcccgtttgggccattggaaccggtaaggtcgctacaaccgagcaggcccaggaagtccactctgccatccgcaagtggctgaaggacgccatctccgctgaggccgctgagaacacccggatcatttatggcggctcagtgagtgagaagaactgcaaagatctcgcgaaggaggccgatatcgatggcttcctcgtcggcggcgccagccttaagcctgccttcgtcgatattgtcaatgcccgcctgtaa

SEQ ID NO: 27940 - DNA, 756 bp, Emericella nidulans
tttttagaaatattaaaaggacacattctaatggatgcaccaacaccatgaggtatatttttccaagatagtgcctcaccacaaatggaaggaataatggaattacataataatataatgttttatttagcaataattttatttacagttacttgaatgatgataacaattataagaaattttgtagctaaaaaatcaccaatagctcataaatatatgaatcacggtacattaatagagttaatttgaacaataacaccagcatttattttaatactaatagcattcccttctttcaaattattatatttaatggatgaagtaatggatccttctttagttgtttatgcagaaggtcaccaatgatattgaagttaccaatatcctgattttacaaatgaagataatgagtttatagaatttgattcatatatagtaccagaaagtgatttagaagaaggtcaatttagaatgttagaggttgataatagagtaattattccagaattaactcacacagcatttgtaatttctgcagatgttatacattcatatgcttgtccatctttaggtataaaagcggatgcataccctggtagattaaatcaagcatcagtttatataaatggtcctggaactttcttcggacaatgttctgaaatatgtggtatattacatagctcaatgaatatagctatacaatcagtatcaataaaagatttcttattatgattaagagatcaaatggaaggataa

SEQ ID NO: 27941 - DNA, 885 bp, Emericella nidulans
gaaactcaaaatgagttcgatgacagcggactgccaggaccaggagcaccaaccccgctctcgtcactggagcggcgaaaattagtccctatggggtttacaacggccacggaaatgcatgctcgacgaagcgaacttatctcaatcacaacgggctccaagcagctggatacgcttctgggaggtggaatagagacaggatcaattacggagattttcggcgagtttaggacgggaaagagtcagatttgccatacccttgccgtcacatgccagctaccattcgatatgggtggcggcgaaggaaagtgtctttatattgatactgaaggaacgtttcgcccggtgcgtctgctagctgttgcgcagcgttacggtctggtaggcgaggaggttcttgacaatgtggcttatgctcgagcatacaactccgatcaccaactgcaactgctcaatcaagcttctcagatgatgtgtgagacccgattctctctcttggtcgtcgactcagctacctccctatacagaactgacttcaacggccgcggtgaactatcaactcgacaaacgcacctggctaaatttatgcgtacattgcaacgtctagccgatgagttcggcattgcagtcgttataacgaatcaagttgttgcccaggttgacggagggccgagtgctatgtttaatcctgaccccaagaagccgattggtggtaatatcatcgcgcatgccagtacaacgagattgagcttgaagaaggggagaggcgagaccagagtttgcaagatctacgacagcccatgccttccggagagtgactgtctcttcgccatcaacgaggatggaataggggacccgagcccgaaggatttagagaatgattga

SEQ ID NO: 27942 - DNA, 1044 bp, Emericella nidulans
actgcagacatggaaactcaaaatgagttcgatgacagcggactgccaggaccaggagcaccaaccccgctctcgtcactggagggtatggcaggcctgaccagtcgtgacatcaaactgtttgtcgatgcgggttatcacactgtcgagtcgatcgcgtatacaccgaaacggttacttgaacaaatcaagggtatctccgaacagaaagccactaaaatcctggttgaggcggcgaaattagtccctatggggtttacaacggccacggaaatgcatgctcgacgaagcgaacttatctcaatcacaacgggctccaagcagctggatacgcttctgggaggtggaatagagacaggatcaattacggagattttcggcgagtttaggacgggaaagagtcagatttgccatacccttgccgtcacatgccagctaccattcgatatgggtggcggcgaaggaaagtgtctttatattgatactgaaggaacgtttcgcccggtgcgtctgctagctgttgcgcagcgttacggtctggtaggcgaggaggttcttgacaatgtggcttatgctcgagcatacaactccgatcaccaactgcaactgctcaatcaagcttctcagatgatgtgtgagacccgattctctctcttggtcgtcgactcagctacctccctatacagaactgacttcaacggccgcggtgaactatcaactcgacaaacgcacctggctaaatttatgcgtacattgcaacgtctagccgatgagttcggcattgcagtcgttataacgaatcaagttgttgcccaggttgacggagggccgagtgctatgtttaatcctgaccccaagaagccgattggtggtaatatcatcgcgcatgccagtacaacgagattgagcttgaagaaggggagaggcgagaccagagtttgcaagatctacgacagcccatgccttccggagagtgactgtctcttcgccatcaacgaggatggaataggggacccgagcccgaaggatttagagaatgattga

SEQ ID NO: 27943 - DNA, 1056 bp, Emericella nidulans
gcccagcaaaagaagacaatcgccgtcgtcaacgcgacggggcgccaggccgcttcgctcatccgcgtcgccgcggccgtcggacatcatgtgcgcgcgcaggtccattcactcaagggcctcattgcagaggagctccaggccattcccaatgtcacattgttccaggggcccctgttaaataatgtcccgctgatggacacgctgtttgagggcgcgcacctcgccttcatcaataccacatcccaggccggtgatgagattgcgattggcaaggacctcgccgacgccgccaagcgcgccggtaccatccagcactacatctacagcagtatgccagaccactcgctctacgggccctggcccgccgtgcccatgtgggcgcccaagtttaccgtggagaactacgtccgccagctcggcctgccgtccactttcgtttatgcgggtatctacaataacaactttacaagcttgccatacccgctcttccagatggagctcatgccagacggcactttcgagtggcatgcaccctttgacccggacatcccgctgccttggctagatgcagagcatgacgtcggcccggcgctgctgcagattttcaaagacgggcctcagaagtggaacggtcatcggattgcgctcacattcgagacgctatctcccgtacaagtatgcgcggccttttcgcgcgctctcaacctccgggtaacgtacgtccaggtccccaaggtcgagatcaaagtcaacattccagtcgggtaccgggaacagcttgaggccatcgaggtggtcttcggtgagcacaaggctccttatttccctctacccgaattctcccgtcctgcagccggatctcccaagggattgggtccagccaacggcaagggcgccggggcgggaatgatgcagggtcccggaggggtaatctcacagcgtgtcacagacgaggcccggaagctgtggtcgggctggcgagacatggaggaatacgcgcgcgaggtctttcctattgaggaagaagccaacgggctggactggatgctgtga

SEQ ID NO: 27944 - DNA, 1134 bp, Emericella nidulans
tcgaataaaaagatagagcagtgggaagtcgagcggtattgggagatcttctcttccttggccggcggccaaccccatctcaacaactcccaggccgcctcagtgctcaggagcagccgtctacgcgatgaccagctggagaaagtgtgggatttggctgacctggacggagatggagaactcgacttcgaggaattctgtgtcgccatgcgattagtcttcgatctggtaaacggggtattaccgcaagttcccaaatcgcttcccgattggctggtccctgaatccaaagcacacctcgtccaagctactcgtgctctaagtggaggccaggagcagttcgagcgtatagaggatgaagatagcacgcccgggctgaaagacggtttcgactggtacatgagccctgaggataaggccaagtacgaggagatatactccgccaataagaaccagcgcggtgaaatagcctttggatccctagaacccctctatgaatctcttgatgtcccagataccgatatccgctcagcctggaacctagtaaacccatccgcgggccccgaaatcaataaggatgccacacttgcctttctccatatcctcaactaccgccacgagggctaccgtatcccccgcacaatccccgcttctttgcgcgcatctttcgaaaataacaagatagactaccagcttgatagcgcgcggccagcgcaaaaatggggcacaaatggcgatacggagacttcgacgggccgcaaggctaaattcggtgatacgtacctgagtcgcctcggcgttgcgggcaagacatcctacacgcccaaggggacggatttcagcgacacgattcaggatgaggagtgggagaaggtgcgactgcgacgcgaactggcagagttagatgccaaactgcaggctgcgaataaggctgttgagggacggaaagctggtaaccggaacgacgggcggccgaactgggttctcattaagaaagaggctcttcagcttctggagtataaggaacgtgagctgcgtgaattgcgcgagggcagtgggcgggccaaagccggcggggatgtcgagctcttcgtgaagatgtccgcacagtgggcgagcaggtcgatggtttga

SEQ ID NO: 27945 - DNA, 1293 bp, Emericella nidulans
gcttcgtggttacaaatccccaagaactcgcctttctcgctggcaaacatcccattcggtatcatttcatcatcgaagctctcgtcgcgagttcccgctattgcgatcggagattatgccttagacttgagcaaatttgcctcgtctggcggtttctcccagcttcccgtcatccagcctcatctgaatgtcttcaaccaatccaccctgaacgcgttcgcagctcttggtcgaccagtgcaccgacaagtccgtgaatacattcagaaggtcttcagcacagagacgccttttcctcaaatcctcagagacaatgcagcgctccagaaagaggccctcctgccgctgtctgaggttacaaaccatctccccatgcagatcggcgattacacagatttctacgccggccttaaccatgcttacaacgttggagtcctcttcaggggacccgacaatgccctacagccaaattataaacatctccccgtggcttaccatggccgtgcctcgtctgtggtcacctccggcacgcctctccaccgtccacagggccagatcttgacgaatcccgcggcaaaccctaaattacccaccttctctccttgcaagaagctcgatatcgaactggagttagcgtttttcgtctcaactcccaatgatctagggcatccggttcatatcgacaaagccgaagaccatatcttcggagtggtgcttatgaacgactggtctgcccgtgacatccaggcatgggagtacgttcctcttggtccctttaacgcaaagaactttggcacaacgatcaccccctgggttgtcctgattgatgctctcgagcccttccgcaccgtcggtctagaacccggaaacagggagtctctcctaccgtatctgcgggagaagcgggctgacactgcctatgatatcccgctggaggtcgaagtcaccaatgcaggcggcgagcctactgttatctcccgcagcaatgcaaagaacctcctgtactctttccctcagatgctggcccaccacaccataacgggctgcaacctgaacaccggtgatctcctcggcagtggtacgatctctggcaaggagaatcagaccgaaggcagtttcctcgagcaaaccaatggaaagaatcctatcaagctcgcagatggctccgagcgcttgttcttagaggacggtgacactgttattctgcgtggtatggcgggaactgaaggcaactatgtagggtttggcgattgtgccggaacaattttgccgcctgtgcagctggatctgtga

SEQ ID NO: 27946 - DNA, 1293 bp, Emericella nidulans
gcttcgtggttacaaatccccaagaactcgcctttctcgctggcaaacatcccattcggtatcatttcatcatcgaagctctcgtcgcgagttcccgctattgcgatcggagattatgccttagacttgagcaaatttgcctcgtctggcggtttctcccagcttcccgtcatccagcctcatctgaatgtcttcaaggaatccaccctgaacgcgttcgcagctcttggtcgaccagtgcaccgacaagtccgtgaatacattcagaaggtcttcagcacagagacgccttttcctcaaatcctcagagacaatgcagcgctccagaaagaggccctcctgccgctgtctgaggttacaaaccatctccccatgcagatcggcgattacacagatttctacgccggccttaaccatgcttacaacgttggagtcctcttcaggggacccgacaatgccctacagccaaattataaacatctccccgtggcttaccatggccgtgcctcgtctgtggtcacctccggcacgcctctccaccgtccacagggccagatcttgacgaatcccgcggcaaaccctaaattacccaccttctctccttgcaagaagctcgatatcgaactggagttagcgtttttcgtctcaactcccaatgatctagggcatccggttcatatcgacaaagccgaagaccatatcttcggagtggtgcttatgaacgactggtctgcccgtgacatccaggcatgggagtacgttcctcttggtccctttaacgcaaagaactttggcacaacgatcaccccctgggttgtcctgattgatgctctcgagcccttccgcaccgtcggtctagaacccggaaacagggagtctctcctaccgtatctgcgggagaagcgggctgacactgcctatgatatcccgctggaggtcgaagtcaccaatgcaggcggcgagcctactgttatctcccgcagcaatgcaaagaacctcctgtactctttccctcagatgctggcccaccacaccataacgggctgcaacctgaacaccggtgatctcctcggcagtggtacgatctctggcaaggagaatcagaccgaaggcagtttcctcgagcaaaccaatggaaagaatcctatcaagctcgcagatggctccgagcgcttgttcttagaggacggtgacactgttattctgcgtggtatggcgggaactgaaggcaactatgtagggtttggcgattgtgccggaacaattttgccgcctgtgcagctggatctgtga

SEQ ID NO: 27947 - DNA, 1362 bp, Emericella nidulans
cctagggagattatcacaatccaagccggccaatgcggcaataacgttggtagtcagttttggcaacagctatgtctcgagcacggaattagtcaggatggaaacttggaggagtttgcgacagaaggcggcgatcgcaaggatgtcttcttctaccagagtgatgatacacgatatattccccgggcaattctgctagacctggaaccgagggtcctgaacggcattcaatccggtccatacaaaaacatctacaatccagaaaacttctttatcgggcaacagggtatcggtgctggtaataattggggtgctggatatgcagccggtgaggtcgtccaggaggaggtcttcgacatgattgaccgggaggcggatggaagtgactctctagagggcttcatgtttttgcactcgatcgctggaggaactggttcagggctgggaagtttccttctagaacgcatgaacgaccgatttccgaagaagttgatacagacatattctgtcttcccggatacccaagctgcagatgtcgtggtcaacccgtataacagtcttcttgccatgcgacggttaacgcagaacgccgactctgttgttgttctagataacgccgcattgtcgagaattgttgcggacagattacacgtgcaagaaccttccttccagcagacgaaccgcctggtgtctactgttatgtctgcttccaccaccacgctccgataccccggttatatgcataatgacctcgtcgggatcatcgcatccctcattcccacgccgcgcagccatttcctactcacctcatacacgccttttacgggagataatatcgatcaggccaagacggtccgaaaaacaaccgttctggatgtcatgcgccgtctgctgcagcccaagaaccggatggtctcgatcaaccccagcaagtccagctgctacattagtatcctcaacataattcagggtgaggcggacccaacggacgtgcacaaatcgctgctccgtattcgcgaacgacgcctagcgtcgtttataccttggggtcctgctagtattcaggtggccttaacgaaaaaatctccatacattcaaaacacacaccgagtcagtggcttgatgctggcaaaccacacctctgttgccacattatttaagcgaatcgttcaacaatacgaccgtctgcgaaaacgaaatgctttcctagaacaatacaagaaggaagctccattccaagacggcctcgatgaatttgatgaagctcgcgcagtggtaatggatcttgttggggagtatgaggcggcagaacgagaaaactacctcgacccagatgcgggaaaggatgaagttggagtataa

SEQ ID NO: 27948 - DNA, 1422 bp, Emericella nidulans
gcttctacactcagacttagtacctctgctctccgctccagcactcttgctgcaaagcccgttgttcagtctgttgccttcaatggcctgcgctgctactctaccggcaagaccaagtcccttaaagagaccttcgccgacaagcttcccggcgagctcgagaaggtcaagaagctccgaaaggagcatggcaacaaggtcattggcgagctcacccttgaccaggcttatggtggtgcccgtggcgtgaagtgcctcgtgtgggagggttccgtccttgattccgaggagggtatccgtttccgtggtctcacgattcccgagtgccagaagcttcttcccaaggcccccggtggtgaggagcctctccctgaaggtctcttctggttgcttctgaccggcgaggttccctctgagcagcaggttcgtgacctgtctgctgagtgggccgcccgctccgacctccccaagttcattgaggagcttatcgaccgcgtgcccagcactctccaccccatggctcagttctctctcgctgtcactgctcttgagcacgagtctgcttttgcaaaggctacggccaagggtatcaacaagaaggactactggaactacaccttcgaggactctatggaccttattgccaagctgcccaccatcgccgccaagatctaccgcaatgttttcaaggacggcaaggttgctcctatccagaaggacaaggactactcctacaacttggccaaccagctcggctttgccgacaacaaggacttcgttgagctgatgcgcctgtacctcaccatccactccgatcacgagggtggaaatgttagcgctcacactacccaccttgttggtagtgctctgagctcccccatgctttccctggcggctggtctcaacggtctggccggtcctctccatggattggccaaccaggaagtccttaactggctcaccgaaatgaagaaggtcgtcggcaacgacctcagcgaccagtccatcaaggactatctctggtctaccctcaacgctggtcgcgttgttcctggatacggtcacgctgttcttcgcaagaccgaccctcgctacacgtcccagcgcgagtttgctctccgcaagttgcctgatgaccccatgttcaagttggtcagccaggtttacaagatcgctcctggcgtcctgaccgagcacggcaagaccaagaacccttaccccaatgttgatgctcactctggtgtcctcctgcagtactacggcctcactgagcgtaactactacaccgtcttgttcggtgtctcgcgtgctcttggtgtccttcctcagctcatcattgaccgtgcttttggtgctcctatcgagcgtcccaagagtttcagcactgaggcttacgccaagcttgttggcgctaagctataa

SEQ ID NO: 27949 - DNA, 1431 bp, Emericella nidulans
gagccgacatttgacatcccggactcgaccgattggctcgacacgccgttaacgcttctcgcgccttttgaaacgtccctccgctgccaggtctgcaaggactttttcgacaaccctgtgatcacgtcgtgcagccacacattttgctcgctatgtattcgccggtgtctgagtacagagggaaaatgccctacatgccggagctctgatcaggagctgaagttgcgtcgcaattgggtggtgcaggagctggtggaggggtttaagaatgctcgaccgagcatattacagctagctaggatggcacaaactggcacggatgatagtggagatttggctgcggaagagcctgcatcgaaaaagcggaaaatagagccgaatgccattgtcggcacagatggtcttcctgaggagggtattcgcacccgatcacagagtcgaggagctagtcggcagccacaagctactcctgttcaggtcatagatgatggtaatgatgaggactatatgccggacggcttggtgccgtgccctgtatgtggacggaggatgaaagaagaagccgtgttccgtcatcttgactcctgtactgggactgcagaggaactgaagccagcggcttttgggtcgttagcacctggcccgcgcaaatcgttcctagcagccacgggaaaaccaccggaaagacttcctgttataaattattctctactgaaagatacggtgctacgaaagaaattgaaggatctgggcataccaaactggggcccgcgagctttgctgcaaagacgacatactgagtggttgaacttgtggaacgccaattgtgactctaggacaccgaaaccgaaacgagagttactgcgtgaattagacgtctgggagcggacccaaggaggaaattcagtcactcccaccgacccaacgaacgctgtaatgaataaggattttaatacggaagagtggtcggcgaactatgacacagatttcaaggcattgatcgcgaatgcgcgaaagaaaaacgatgctgttattcgctcaacaataccgaacgcttcccaagcgaattcggataccccgcgaagcgcccaactcgttgatcagcctatcgaagcttcgctaactccgcaagatgtggacgagaaaagcacaatgaatcctcaggatgctatcgacaatagaacagaggttcccccggtaccagatcctccccaagcattaagcgggatagatcgtgcggtgaattcgccgatgaagaatgtgaccgagggcgatgccaggcgattcccatctccagcagtgcgtccacccataaaacgccgcattgaatctgtcaaacggtctcgtcagcgagaccgacattcagacagttccgaactccagcaatggctaggactgcgccggcccctcagtacctctgtgtttaattga

SEQ ID NO: 27950 - DNA, 1443 bp, Emericella nidulans
gccaaggaagtggactacacgatcaagccggaggctacggcctccaatattaacacagaagactggccgcttctgctcaaaaactacgacaagctgatggtcaggactggtcatttcacgcccattcctgctggttcctctcccctcaagcgagacctcaagtcgtacattaattctggagtgatcaacctcgacaaaccctcgaacccttctagtcacgaggttgttgcctggatgaagagaattctcagggcagaaaagactggtcatagcggtactcttgatcccaaagttaccggttgcctgatcgtttgcattgatcgtgctactcgtttggtcaagtctcaacaaggtgccggaaaggagtacgtctgtgttatccgtctccatgataaaatacccggtggtgaagctcaattcaagcgggctctcgaaactctcacaggtgctcttttccaacgtccacccctgatttcagcggtcaagcgtcagcttcgtatccgaacaattcatgagagcaaactttatgagttcgacaatgagcggcaccttggtgtgttctgggtcagctgtgaagctggtacatatatccgtacactctgtgtccacctcggtcttcttctcggtgttggcgcacacatgcaggaactgagacgtgtgcgaagtggagctatgagtgaaaacgagggtatggttacgctgcatgacgttctcgatgcgcagtggctatatgacaatcagcgggatgagagctatctgcgcaaggttattaagcccttggagtctctgctcacaacctacaaacgtatcgtggtcaaggacagcgccgtcaatgctgtctgctacggtgccaagctcatgattcctggtcttcttcgcttcgaggctggtatcgagcttggtgaagaagtcgtgctcatgaccaccaagggtgaagctatcgcaattggtatcgctcagatgtctaccgtggaactttccacttgtgaccacggtgttgttgccaaagtcaagcgctgtattatggagcgcgatttgtaccctcgccggtggggactgggccccgtggcgctggaaaagaagaagctcaaatcctctggaaagctcgacaaatacggacgagccaacgaagccaccccagccaaatggaagtccgaatacaaggactacagcgcaccggatggagactcatcgcagcaagcagtcgatgtggttgcaaaggaagaggcctcacctaaagaagagccctctctagaggcaaatgaatctaagatggacattgacgacgcccaggatgacgaagacaagaagaagcgcaagcgacatgaaggcgagactcctgaagagcgtgctgagcgtaagcgcaagaagaaggagaagaaggagaagaaggagcgaaggaagtccaagcaggagaaggacgacagcgatgatagtgattag

SEQ ID NO: 27951 - DNA, 1644 bp, Emericella nidulans
cctcaatcctgggaagaactggccgctgataagcgcgcccgcctcgcaaaaaccatccctgatgaatggaaagtccagacgctgcctgcggaagacagcgttattgatttcccaaagaaatcggggatcctttcagaggccgaactgaagatcacagaggcctccgctgcagatcttgtgtccaagctggcggccggagagttgacctcggtggaagttacgctagcattctgtaaacgggcagcaatcgcccagcagttaacaaactgcgcccacgagttcttccctgacgccgctctcgcgcaggcaagggaactcgatgaatactacgcaaagcacaagagacccgttggtccactccatggcctccccatctctctcaaagaccagcttcgagtcaagggctacgaaacatcaatgggctacatctcatggctaaacaagtacgacgaaggggactcggttctgacaaccatgctccgcaaagccggtgccgtcttctacgtcaagacctctgtcccgcagaccctgatggtctgcgagacagtcaacaacatcatcgggcgcaccgtcaacccacgcaacaagaactggtcgtgcggcggcagttctggtggtgagggtgcgatcgttgggattcgtggtggcgtcatcggtgtaggaacggatatcggtggctcgattcgagtgccggccgcgttcaacttcctgtacggtctaaggccgagtcatgggcggctgccgtatgcaaagatggcgaacagcatggagggtcaggagacggtgcacagcgttgtcgggccgattacgcactctgttgaggacctccgcctcttcaccaaatccgtcctcggtcaggagccatggaaatacgactccaaggtcatccccatgccctggcgccagtccgagtcggacattattgcctccaagatcaagaacggcgggctcaatatcggctactacaacttcgacggcaatgtccttccacaccctcctatcctgcgcggcgtggaaaccaccgtcgccgcactcgccaaagccggtcacaccgtgaccccgtggacgccatacaagcacgatttcggccacgatctcatctcccatatctacgcggctgacggcagcgccgacgtaatgcgcgatatcagtgcatccggcgagccggcgattccaaatatcaaagacctactgaacccgaacatcaaagctgttaacatgaacgagctctgggacacgcatctccagaagtggaattaccagatggagtaccttgagaaatggcgggaggctgaagaaaaggccgggaaggaactggacgccatcatcgcgccgattacgcctaccgctgcggtacggcatgaccagttccggtactatgggtatgcctctgtgatcaacctgctggatttcacgagcgtggttgttccggttacctttgcggataagaacatcgataagaagaatgagagtttcaaggcggttagtgagcttgatgccctcgtgcaggaagagtatgatccggaggcgtaccatggggcaccggttgcagtgcaggttatcggacggagactcagtgaagagaggacgttggcgattgcagaggaagtggggaagttgctgggaaatgtggtgactccatag

SEQ ID NO: 27952 - DNA, 1680 bp, Emericella nidulans
aagacgttgcaatatttgctcaagtatagtttagcatgctatctcatggtaatcccaattagtagtacagtgagcagcctactggtgaggtccttgatgtggagctccgaaaaaggcttagtggattttgcgagaagagccgttgaaacgccaggcggagacattttgcacgtcccccacgccgggttcctccgaccaacagcacggagctacagacctaatatattttggatggaggaccttgaaaccagatgcgcgtccttgcgcaccgaaatagcagccgcggaagcgcagctcacgaaactaaagcgcgaactccatgaagcggagggcgcagcactcagagcccaatcccaaaaaactgcgagtgcgaacgcaaccaccggacaacggaccaagtcaaaatggcccttacacggcgaagagtatagaagatatggacggcaaatgatagtgccgcaatttggtttgcagggtcaactgaagttacgagatgcgaaagttttgattgtcggtgcaggtgggctcggttgtccggctgcgctatatcttgctggtgctggagtagggacgatcggccttgttgacggggacactgttgaagcgtcaaatttgcatcggcaggtgctgcatcggagccggaatgtggggaagttgaaggttgatagcgcgattgaatatttgcgagaattgaacccgcatccgacgtacatcgcgcaccaagcacatctcacacctcgcgaggcgccagatattttcaaagactatgacttaattctcgattgcacggataacccggcgactcgttaccttatttcagacactgccgttcttctgggcaagccgttggtttcggcatcggcactacggacggaaggccagctcatggtgttgaataaccctccgcagccgcctggagacaagacaggtggcccatgctaccgttgtgtttttcccaaaccgccgccggcgaacagcgtaacaagttgcgcagacggcgggattctggggccggttgtaggcacaatgggtgtactacaggcttcggaagcgataaaagttcttacgtccgctggagaaagcgttgaagcgaccccaccgtctcttctcatcttctctgcttattcaagcccgcagtttcggaccataaagctgcggtcgcggcgtccgaactgcgcggtatgttctgccgaagcgaccgtaaccttggaaagcgtgaggtcaggatcaatggactatgttttcttttgcgggactgtcgatccggcggatatcctttccccagaggagcgaatatctccgtcagaatatggaaatgttgatagcgccggtgcacaaagacacattatcgatgtgcgggagaaagtccagttcgacatctgtagcttggaaaatagtatcaacattccgatgtcgacgatccttgcttccgcttacagtgcaccgacgctggacgccgatgaaccgaagcgcctgccttcatggctgccacctgaggttgcccacgagtcaaataagccaatctatgtggtgtgtcgacaaggtaatgattcgcagacggtggttagaaagctgaaagagctggggcttgaccatggaggcgagcgtcccgtggtcgacataaagggaggattccgctcctggcgagaacaggttgaccctgactggccggactattga

SEQ ID NO: 27953 - DNA, 2034 bp, Emericella nidulans
tctaccgaggataatcacgattcgcaaattttgacggcaagacatcgctcggacgccagcgagcagtcgttcaaatccctgttcggcggcccatcgagtgaagacggaaaagagacggagcccgatacccacgatcataaccatagcttcagcaacgcaaaggcgcccgcaaagtttgcaaaccagaatgtcgcacccttcctcgccagacacatccctgaacaatatgcacccttaggtgctcagtcgattctaccagcagatctcagcagcgcaaactccaaatactgttatcgccatcgcccagatcagaaatgtagacggcaagccgacgagccatctatggataagctacagcgggaactggaatcgcttcctcaaggtgatcagcagagcatatcacatgtctggtccttgttctctgctgcgcctgccaaacatcggaaactcattctgcagggaatcatggctcaatgctgtttcccgcaactctcttacatctccgccaccgtccgtgacctcatccgaatcgatttcatcaccgcgctccctcccgagattgctttcaaaatcctttgctatctggatacaacctctctgtgcaaggcttcccaggtctcgcgcggatggcgtgcgctagccgatgatgatgtagtttggcacagaatgtgtgaacaacatattcatcgcaagtgcaaaaagtgtggttggggcttaccgcttctggatcgcaaacgattgcgtgagtcgaagcgtgagattgaacttcgtgctacaacgtgggacaagggagtggtgggcccacgatcccctgatgcttcggcagagtcacctccttcgggcaaacgaaagcttgaggatgacgaggttgctgttgttaagcggcactgttcatcgctcgggtcagacgcaggagtcgacaaagatagtgatttcttcaagacccgctaccggccatggaaggaagtgtacaaagatcgcttcaaggtcggcacgaactggaaatacgggcgatgctcgatcaaaacatttaagggacatactaatggagtcatgtgtctgcaattcgaggataacattcttgccactggctcctacgacactacaatcaaaatctgggacactgaaaccggggaggagctgcgcacactccgtggacacgagtctggcatccgttgcttacagtttgacgacaccaagttgatcagcggcagcatggaccgcactatcaaggtctggaactggcgcactggggagtgcatttccacatatactggtcaccgcgggggagtcattgggcttcactttgatgcttcgattctcgcctctggctcggttgacaagacggtcaagatctggaacttcgaggataagtcgactttctccctgcgtggacacacagattgggtcaatgcagtcagagtcgacacttcctctcgaactgtcttctcagcatctgatgactgtactgttcgcctttgggacttggacacgaaaacctgcattcggactttccatggacacgtgggtcaagtgcagcaggttgttcctctgccccgcgaatttgagttcgaagaacatgatgccgagtgcgagaacgacgatctcagtaccacctccggcgacgcgaacccgccgtcaatccaggcttcgatgggtttggaacccaacgcagcgtacagccaatcctcggcctttgggacttcgttcgataacggccgtgccgcgccgccacgatacatggttacaagtgcgctggattctacgatccgcctctgggaaaccaccaccggccgctgcttgcgtacgttcttcggccacttggagggagtatgggcgctgggagccgacactctccgcatcgtctctggcgctgaagaccgtatgatcaagatctgggaccccagaactggtaaatgcgagcgtactttcaccggccactctggccctgtcacttgcattggccttggtgacagtcgattcgctactggcagcgaggactgcgaagtacggatgtacagctttcagagttaa

SEQ ID NO: 27954 - DNA, 2082 bp, Emericella nidulans
actgagcccatgctatttaagcggggcgcagctcaagcgacttcgtccttttctcgatttccccgcatccatactcgaactcgactcccgacgtggcgccggttgagcccttcgccttcgcgatatgtcactaccggtttgaacccgcaagtggaagttcaggatgaaccaactaggtctccatctcctacaccgacatcgtcgactcgctggaacgcgctgaaaacagcaaagccgttctcggcgtttctgacagacacattcaaccgccagcatgattaccttaggatcagtgtcacggagcgctgcaatctgcgctgtctatattgtatgcctgaagaaggcgtaccgctatcccctcccgcgcacgtcctgacgtcgccggagattgtgtacctttcgtcgctcttcgtctcgcagggcgtgaccaagatccgtctgactggcggagaaccgactgttcggaaagacatcgttcctctgatgcagtcaattggagaattacgacatcacggactccgagaattatgcttgacaaccaatggcatttcactccatcgtaagctcgagcctatggtggaggctgggttgactggggtaaatctcagtctggacactttggatccgttccagtttcaaattatgacgaggaggaagggctttgatgcggttatgaagagcatagaccgcatccaggagctgaataagatgggagctgggataaagctcaagatcaattgtgttgtgatgcggggcctcaacgaacgcgagattattccgtttgtcgaaatggggcgtgatagccccatcgaagtgcggttcattgagtatatgccatttgatggcaataagtggagtaagggaaaaatggtttcctatcaggagatgctggcccttattcgggagaagtatccaacattggagaaggtggtggatcataagaatgacacgagcaaaacttatcgcattcctggattccaaggccgagttggctttatcacgagcatgacgcataacttctgcggcacttgcaaccgccttcgcattacgtgcgatgggaatcttaaagtctgcctatttggaaactcggaagtctcgctgcgtgatataatccgacaacagaataatggcgagcccattgacgagactgcgctgcaagagctaggtctccttgaggcagctcgaacagcagcccgcgttcatgacgaaggtggagtagtcagtcaaagagaaagagagcttcttgacgttattggcatggcagtgaagcggaaaaaggccaagcatgccggcatgggagagttagagaacatgaagaaccggccgatgatccttattgataaaacgagcgatgcccagagaaatataaggtacttcgcctccatgtcgtcaatgatgtccaagggacaagtaatgaacgtatcgacgcattcactcggtctcgggatgccaatggctacccaagtccgactttaccatcgcgaacgtaccacaacttcgtgcgaggaacccagcaacaaggactcaaaattcgcttcgctccctacatccgacgaccccgatctgcctcatctcaatcgctcgcaaaacgtccatatgacgctgattgatgaaaagcccatttcaaaacgcctcgcaacagccacctgtcacgtccgcttctccaaccgacgtccctgggaactcctcagacaaggccccggcagccgcaaaggcgacgtatttggcatcgctcgtattgccggtatcaccgccgcgaagaagacgccggatattgtaccgctttgtcatcctgggctggggttgacgggggtggaggtggatgtgaagcttcttgacccgtccgccgatgacgctgagatgaagcatggggcaatgcatgtcacggccacggtgggctgtgttggaagaacgggggtggagatggaagccatgacggcgacgatgggggctgcattgacggtgtatgatatgttgaaagcggttgacaaggggatggtgattgggggagtgaaactgctagagaagatggggggcaagagcgggcattgggtaagagaggagaacgtgaaggatgagtag

SEQ ID NO: 27955 - DNA, 2115 bp, Emericella nidulans
tctgctgaaacttctaccacccccgcccccgccgagaacaccaacggcaccccagacaacgctcctgctcccgaggttaccgctgtcgaggcccccgctaccacctcccagcctcactcggcttctctctatgtcggtgagctcgacccctccgtgacggaggctatgctctacgagcttttctcctccatcggtcaggttgcctccatccgtgtctgccgtgatgccgtcaccagacgctccctcggttatgcctacgttaactacaacgataccgctcacggtgagcgcgctcttgatgagctgaactacaccctgatcaagggcaagccctgccgtatcatgtggtctcagcgtgaccccgccctgcgcaagactggccagggcaacgttttcatcaagaacttggacagcgctattgacaacaaggctctgcacgataccttcgcagccttcggtaacattcttagctgcaaggtcgctcaggatgagttcggtgtctccaagggttacggtttcgtgcactacgaaaccgctgaggccgccaacaacgccatcaagcacgttaacggcatgcttctgaatgacaagaaggtcttcgtcggccaccacatctccaagaaggatcgccagagcaagttcgaggagatgaaggccaacttcactaacatctacatcaagaacattgacccagaggtcgaggatgaggagttccgcaagctgttcgagaagttcggtgaaattacttccgccactctgagccgtgactccgagggtaagagccgtggcttcggtttcgtcaacttctccacccacgagagcgcgcaggccgccgtcgaggagatgaacgacaaggaagtccgcagccagaagctctacgttggccgtgcccagaagaagcacgagcgtgaggaggagctccgcaagcagtacgaggccgcccgcatggagaaagcctccaagtaccagggtgtcaacctctacgtcaagaatcttactgacgatgttgatgatgacaagctccgtgagcttttcggtccttacggtactattacctccgccaaggtgatgcgcgacaccgctcctgttgagaccgccactcctgagtctgagaccaaggagtccgccaacaaggagaatgagaaggccgccgagggtgagaaggaacctgccgctgaggagaaggagaaggaggaggagaaggaggctgagcagaagcctgagaagaagcccctcggcaagagcaagggctttggtttcgtttgcttcagcagccctgacgaggcctccaaggctgtcactgagatgaaccagcgcatggttaacggcaagcctctctatgtcgcccttgcccagcgcaaggatgtccgccgcagccagcttgaggccagcatccaggcccgcaacaacatccgccagcagcaggctgccgctgcagccggtatgggccaggcttacatggctcccgccgttttctacggccccggccagcagggtttcatccctggtgctcaacgtggcggcatgttccctccccagcccggtatgatgatgggcatgcccggtcgccctggtcagtaccccggtcctttccctggccagcagggtggacgtggcgttggccccaaccagcagatcccccccaacttccaaggtctccccatgggcgccatgcagggccctggtatccctaacggcatgggctaccccatggttcagggtcagtttggtggtggccgtggccgtggtcaggtccccggaatgggtggtcctatgcgtggtggctacggtggcggccgtggtggcgttcctcttggcggacagatgcgccccggccagggcggtcgcggtcaagccgtcggtcagcccggacccgaaactcccgtcggtgttctcactgcccaagctctctccgccgctcctcctcagcaacagaagcagatgctcggcgaggctctctaccctaagatccaggccactcagcccgagcttgctggtaagattactggtatgcttctggagatggacaacactgaactgcttggcctgctgaggatgacgaggctttgcgcgccaaggtcgacgaagcccttagcgtttatgacgagtacatga

SEQ ID NO: 27956 - DNA, 2619 bp, Emericella nidulans
tctacaaccgtcacacaagtgcggacgggctccatacccaagactctcaagacttcccagatcagggtcgaagagcaagagatcacagagctcgatactgcagatattcctttacctcctccttcgaaagaaccaaccgaggttctaagtctagataaaactacaccagatagccatgtcccccgagatccccggctgatccggctcactggcgttcacccgttcaatgtcgagcctccattgacagcactctttcagcaaggcttcttgacgcctcctgagctattctacgtccggaatcatggcccagtgccccatgttcgcgacgaggacattcccaactgggaactccgcattgaaggactcgttgaaaagccaatcaccctcagcttcaagcagatcctgcagaactatgatcagatcacagctcctattacactagtatgtgcaggcaacagacggaaagagcaaaacacagtacggaaatcgaaaggcttctcatggggctcggccgctctgtctactgcgctcttcaccgggcccatgatggccgatatcataaagagcgccaagcccctgcgaagagcaaagtatgtctgcatggagggtgccgataacttgccgaacggaaattacgggacatccatcaaactcaactgggccatggacccgaatagaggcattatgctcgcgcacaagatgaacggcgaagacctcagaccagaccacggtcgtccgctgagggccgtcgtaccgggccagattggagggcgcagtgtcaagtggctgaagaagcttatcatcaccgacgcgcccagcgataactggtaccatatttatgacaacagggtgctacctacaatggtcacgccagatatgtcgtcccaaaacccgtcatggtggcgcgatgaacgctacgccatctacgatctgaacgtcaattccgccgccgtctacccccagcacaaggaaaccctggatctggccgccgcgaggccgttctacacagcaaaagggtatgcctatgcaggaggcggacgaagaataacccgtgtcgagatctcgctggataagggcaaatcatggcgccttgcgcggatcgaatacgccgaagacaaataccgcgacttcgaaggtacgctctatggcggccgcgtcgacatggcctggcgagaagcctgcttctgctggtccttctggtccctcgacattcccgtctcggaactcgcaagcagtgatgccctactcgtccgcgcaatggacgaagcacttagtctccaaccaaaggatatgtactggtctgtccttggtatgatgaacaacccttggttccgggtcaagatcaccaacgagaatgggcggttgctcttcgagcatccgactgatatcactggctcgagcgggtggatggaacaaatcaagaaagcaggaggcgacttgacgaatgggaactggggcgagaggcaggagggtgaggagcctgttgaagcggagcccgtggtggaggtcaatatgaagaaagagggcgtgacgaggatcattgatctagaggagttcaaaaagaactcgtcggacgagaggccctggttcgtcgttaacggggaggtatatgatggcacagcattcctagagggacaccccggcggagctcagagtatcatctcggctgctggaacggatgcttctgaggagttcctcgaaatccacagcgaaaccgccaaaaagatgatgccagactaccatatcggcaccctcgacaaagcctcgctcgaagcccttagaaagggcaacgcagacacaacagactcatccagcgatccccgccctactttccttacccccaaagcctggacaaaagctactctgacgaagaaaacatctgtctcctccgacacgcacattttcactctctcccttgagcacccatcccaagccctcggccttccaacgggccagcacctgatgctcaaaacccccgacccaaagtcctcgagctcaggcagcattatccgctcgtacaccccgatatcaccatccgatcagctgggaatggtcgacattctcatcaaaatctacgccgagacacccagcatccccggcggcaagatgaccacagccctagataccctgccgctcggttccgtcatcgaatgcaagggtcctactgggcgtttcgagtatctagaccgcggaagggtcctcattagcggaaaggaaagatttgtcaagtctttcgtcatgatctgtggcgggacgggcatcacgcctgtcttccaagtccttagggctgttatgcaagatgaacaagatgaaacgaaatgtgtcatgcttgatggaaaccggctagaggaagacattttgctgaagaacgagctagacgaattcgaggctttggccgggaagaaagagaagtgcaaaattgtgcatacactgacgaaggggagtgaaagttggactgggcggaggggacgtattgatgaagaattgattaggcagcatgccgggacaccggatagagagaccatggttttggtttgcgggcctgaggcgatggagaaggcttcaaagaagatcctactgtcgttgggatggaaagaggagaaccttcattacttctag

SEQ ID NO: 27957 - DNA, 339 bp, Emericella nidulans
tttttccttgccgagtcaccgtggaccacgtctccgacagaaaatgctccgcctcagcaaggagcagaactgacctgctaccggcgaaatcttttccagatcactggttctgtaacccttcctcgggccctgcgctatatcatcaccgacaccggtgaccggatacctatcgtcgcgcacgaactgacagtgatcttgatgccgattacgccacttttccaatcgcatggaagcgtcttcaattccgtgtcgcgactgccaacaatgggcgaagaaaggagcttcaacagcactttgtggttcggctcagggtcgttgcaacattgtccacgggtatga

SEQ ID NO: 27958 - DNA, 408 bp, Emericella nidulans
cctcccaaagctgccgagaagaagcctagcactggcggcaaagcccctgctggcaaggccccagctgagaagaaggaagctggaaagaagaccgccgctgctgcctctggcgagaagaagaagcgcggaaagaccaggaaggagacctactcttcttacatctacaaggtcctcaagcaagtgcacccggacactggtatctccacccgtgctatgtctattctgaactctttcgtcaatcgcgttgcgacggaggcgtccaagctcgctgcttataacaagaagtccaccatatcatctcgagaaatccagacctctgtgaggctgattctgcccggagaactcgccaagcacgctgtgtctgagggcaccaaggccgttacgaagtattcctcatctgccaaatag

SEQ ID NO: 27959 - DNA, 420 bp, Emericella nidulans
cctcccaaagctgccgagaagaagcctagcactggcggcaaagcccctgctggcaaggccccagctgagaagaaggaagctggaaagaagaccgccgctgctgcctctggcgagaagaagaagcgcggaaagaccaggaaggagacctactcttcttacatctacaaggtcctcaagcaagtgcacccggacactggtatctccacccgtgctatgtctattctgaactctttcgtcaatgatatctttgagcgcgttgcgacggaggcgtccaagctcgctgcttataacaagaagtccaccatatcatctcgagaaatccagacctctgtgaggctgattctgcccggagaactcgccaagcacgctgtgtctgagggcaccaaggccgttacgaagtattcctcatctgccaaatag

SEQ ID NO: 27960 - DNA, 447 bp, Emericella nidulans
gccgactctctgaccgaagagcaagtttccgagtacaaggaggccttctccctatttgacaaggatggcgatggccagattaccactaaggagcttggcactgtcatgcgctcgctcggtcagaatccttcagagtctgagcttcaggacatgatcaacgaagttgacgccgacaacaatggcaccattgactttccagagttccttaccatgatggccagaaagatgaaggacaccgattccgaggaggaaattcgggaggcgttcaaggtcttcgaccgtgacaacaatggtttcatctccgctgctgagctgcgtcacgtcatgacctcgatcggtgagaagctcaccgatgacgaagtcgacgagatgatccgcgaggcggaccaggatggcgacggccgaattgactacaacgaattcgtccaacttatgatgcaaaaataa

SEQ ID NO: 27961 - DNA, 459 bp, Emericella nidulans
gaaaaatcaatcctcctcatcaatggcccgaacctcaacctcttgggcacccgcgaaccgcacatctacggctcaaccacgctctccgacgtcgaagaatcctccaaaggtcacgcagcttcgctcggcgcctccctgcaaacatttcagtcaaaccatgaaggtgccattgttgagcgaatccatgccgctcgcgggaacaccgacgcgatcatcatcaaccccggtgcatatacacacacctctgtcgctattcgggatgccctgttaggagttgagattcccttcatcgaactccatgtgagcaatgtccatgcacgagagccgttcagacatcacagttactttagcgacaaagcgtcaggcatcattgtgggactgggtgtgtatgggtacaaggtcgcagtggagcatgttgcgttgaacttcaagcctctggagaaaaaggctgctctttaa

SEQ ID NO: 27962 - DNA, 459 bp, Emericella nidulans
gaaaaatcaatcctcctcatcaatggcccgaacctcaacctcttgggcacccgcgaaccgcacatctacggctcaaccacgctctccgacgtcgaagaatcctccaaaggtcacgcagcttcgctcggcgcctccctgcaaacatttcagtcaaaccatgaaggtgccattgttgaccgaatccatgccgctcgcgggaacaccgacgcgatcatcatcaaccccggtgcatatacacacacctctgtcgctattcgggatgccctgttaggagttgagattcccttcatcgaactccatgtgagcaatgtccatgcacgagagccgttcagacatcacagttactttagcgacaaagcgtcaggcatcattgtgggactgggtgtgtatgggtacaaggtcgcagtggagcatgttgcgttgaacttcaagcctctggagaaaaaggctgctctttaa

SEQ ID NO: 27963 - DNA, 480 bp, Emericella nidulans
gccgagaaaatgcttgttatgaccagcaacgatggcaagaacatcgaagtcccccgcgatgttgccgaacgttctcttctcatcaagaacatgctcgaggacctgggtgaccccacagagcccattcccattcccaacgtctcggaaaatgttttgagcaaggttctcgaatggtgcgcccaccaccggaacgaccctcccagctctgcggatgatgacgattcgcgccgcaagactacggatattgaggagtgggaccagaagttcatgcaggttgaccaggagatgctctttgagataatcttggccgccaactaccttgacatcaagcctctccttgacatcggatgcaagactgtcgccaacatgatcaagggcaagtcccccgaggaaatccgcaagactttcaacatccagaacgacttcacccccgaggaagaggaccagatccgccgcgagaacgaatgggccgaggagtga

SEQ ID NO: 27964 - DNA, 543 bp, Emericella nidulans
tctctgttcagaaccattcctacccccggagactttgctcctctcttccgtctcctggatgactacgacaaccaccgctccgcccgcggtcacgcctcagtgcagtcttttgcgcctcgcttcgacgtccgcgaatccaacgaggcctaccatcttgacggcgaactccctggtattcctcagagcaatatcgacattgagttcaccgacccacagaccctggtgatcaagggccgctccgagcgcgagtaccactcctccagcgacgacaacaaaaatgatcaggccgatacagagaaccaggcccggggtgaaagcagcgaagttgcaaagaccggcgagaagcaggtatccaccaagaaggctgccaacaagtctcgctactgggtcagcgagcgctctgtcggcgaattccagcgcaccttcaccttcccaactcgagtcaatcaggacgatgtgaaggccagcttaaaggacggtattctttctcttgtggtgcccaaggctgtgcctccgactgctaaaaagatcaccattcagtaa

SEQ ID NO: 27965 - DNA, 618 bp, Emericella nidulans
gccacaaacatcacccaccacgccggcctcacgcgcaatgagcgcaaccagctccgcaagcagaaaggcctcacaatatggttgaccggcctctccgcctccggcaagtctaccattgccgttgagctggagcaccagcttctccagcgcggtctgcacgcctaccgcctcgacggcgacaacgtgcgcttcggcctgaacaaagatctcggtttctccgacgctgatcgcaatgagaacatccggcgcattgcagaagtcgcgaagctcttcgctgacagttcctcaatcgccatcacgagtttcatctctcctttccgggctgaccgtgataccgcgcggaaactgcacgaggtccctacgccgaatgatagcactggtttgccatttgtcgaggtattcgttgatgtgccgattgaggttgctgagaagagagatcccaaggggttgtacaagaaggcccgtgagggaatcatcaaggagttcacgggtattagcagtccgtatgaggcgcctgaaaacccggaggttcatgtgaagaatgtggatctaccgattcaggaggctgtcaagcagattattgactacttggatagcaagaagttgcttgatgcttag

SEQ ID NO: 27966 - DNA, 675 bp, Emericella nidulans
gtctccttcaaatctctcctagttctctgttgcgctgcccttggggcattcgctacgcccgtcgggtctgaagacctcgccgcacgcgaggcaagcctgctcgaacgttctacccctagctccaccggctggagcaacggctactactactccttctggactgacggtggcggcgatgtgacctacaccaatggtgccggcggctcatacacagtgcagtggagcaacgtcggaaacttcgttggtggaaaaggatggaaccccgggagcacaagaaccatcaactacggcggaagcttcaaccccagcggcaacggctacctcgccgtatacgggtggacacagaacccgctgatcgagtactacatcgtcgagtcatacggtacgtataatcccggcagtggcggccagcaccggggcaccgtgtactctgatggcgcaacgtacgacatctacaccgcgacccggtacaatgcaccgtccatcgaaggcaccgctaccttcgagcagttctggtctgtccgccagtcaaagcggacgggcgggactgtgactacggccaaccatttcaatgcttgggcggccctggggatgaggctgggcacccataactatcagattgttgcaacggaggggtaccagagtagtgggtcggcttctattactgtttactag

SEQ ID NO: 27967 - DNA, 690 bp, Emericella nidulans
tctacaaattcagacctcagagtgacactctacacctactttcgctcctcgtgctccgcgcgccttcgtatcgccctcgcccttaggtcaatctcctatacctcagtccctatcaacctgctgaagggcgagcagtcgagcacaaaaaacacggccgtaaacccatcggccaccgttcccacgctcatcatcgagcatgtagaccggagccagtctccaataacaataacccagtccctcgcagcgctcgaatacctggatgaagcattccccgacaatcccaacccactccttccacctatttctaacccgcaacaacgcgcgctcgtgaggtctctagcatcaattatagcctgcgacattcagccagtcacgaacctacggattcttcagcgcgttgcaccattcggcgtcgaccgggccgcctggtcaaaggatctcattgaagctgggtttgcggcgtatgaggctattgctagagactctgctggagtattcagtgttggcgatacaatcacgatggcggatgtttgtttgatccccgctgtttggggcgcagagagagcgggggtaaatctgggacagtatcctacaattaaaagggttgcggaggccctggagaaggagaatgcagttaaggaggggcattggagaacccagcaggatacaccaacggaattcaggtgttga

SEQ ID NO: 27968 - DNA, 780 bp, Emericella nidulans
ccatctgcagccgtttctgtaccagaagttccttcgtccgaccgcaagacggtctacctagtgaaccggtgccagcagggggggctcgtgcaggcatttctccttcgccccaacagcatcgtcatcgccggtctccgcaatcgcacttcgcaggcgggggccttggatgcgctcccaagaggcgagaactcctcgctgatcgcagtccaactggacagtggatcgaagtccgatcccgccgacgcggtcagcattctccagcgcgattacggcattacgcatctcgatgtagtgatcgcgaacgcagctattgcggccaactacggtccagcctcgaccatgcctctcgagtatctggagactcacatgcagattaacgcatacgcggccctgctactgttccaggcgactagggtccttctccaggccgccaaatcgccgcagttcatctgcgtcggggccccgattagcacgattaccgagatggagagctgtgcgcgggcacccgtcacaaattatgcactttcaaagctggccgcctgctatctggtgcgcaagatccactttgagaataagtggcttgttgcgtacattgtcgaccctggacacatccagtcagatatgggcgccaggtctgccaggttgttcgggcgcaaagaggcccccacgacgatagaggaaagcgtggctggtatctgtgccaggatgaccgaggccgacaagaatacaacgtctgggcgctttattctattttcggacggctcagacgtgccctggtag

SEQ ID NO: 27969 - DNA, 795 bp, Emericella nidulans
gagcaagcccagcagacttctggacagcagcaggggaggcagcagcccgtgtacgacacgagacaaggtggacactatggtgccagcgccgcgctggccgcacaaggattcgccccggttgctgagctgtatactggtacctgggcaaatgtcaaccagggcttgcagggaacagcccgtgacatcttgacgacgtattggcaacacgtaatcaatcacctcgaatccgataaccatgattataaaatccaccaactccccctagcccgcatcaagaaggtcatgaaggctgatccggaagttaaaatgatatccgcagaagctccgattttgtttgctaagggctgtgatgtttttattaccgagctgactatgcgggcatggattcatgccgaagacaacaaacggagaacacttcagagatcagacattgcagcagcgttgtcaaagtctgacatgttcgattttctcatcgatattgttccccgtgaggaagccacgtcgcatgcaaagcgctcgagtcagtcagcgggtgcgccagctgggcctggaggacctaccgctgcgggccagttgccacaaactcagcacggggttcagcatcatccccatcatatggcgccgccagattatggtgcgttaggacagcatcctcttcaagaccaggaatacaggcagcaaactatgtatggaggagcagtacagtcagacccaacagcggcgtatgcccagcctcaaactcaaatgtttgaaggaatgtatactgcttaccctcatttacccccgcagcagtga

SEQ ID NO: 27970 - DNA, 822 bp, Emericella nidulans
tcttcgaagtcccacctcccctacgcaattcgcgcaaccaaccatcccaaccctttaacatctaaactcttctccatcgccgaggagaagaaaaccaacgtcaccgtctccgcagacgttactacttccgccgagctcctcgatcttgctgaccgcctaggcccctatatcgcagttctgaaaacccacatcgacatcctcaccgatctcaccccgtcgaccctttcctcgctccaatccctcgcgacaaagcacaacttcctcatctttgaggaccgcaagttcatcgacatcggcaacaccgtgcaaaagcagtaccacggtggcgctctccgcatctccgaatgggcacacatcatcaactgcgccatcctgccgggcgaagggatcgtcgaggccctcgcacagacaaccaagtctcctgactttaaagacgcgaatcaacgaggtctcctgattcttgccgagatgacgagtaagggatctcttgcgacaggggagtcacaggcacgctcggttgagtacgcgcggaagtataaggggtttgtgatgggattcgtgagtacaagggcgttgagtgaggtgctgcccgaacagaaagaggagagcgaggattttgtcgtctttacgactggggtgaatctgtcggataagggggataagctggggcagcagtatcagacacctgggtcggcggttgggcgaggtgcggactttatcattgcgggtaggggcatctataaggcggacgatccagtcgaggcggttcagaggtaccgggaggaaggctggaaagcttacgagaaaagagttggactttga

SEQ ID NO: 27971 - DNA, 987 bp, Emericella nidulans
gagccaatcaccattcccaccgaccgcgacggtgtcgcctacctttacggtcacccactccccaactcgctctctcctcctcttcatcaaacagtctacaacgcgcttggcctgaactggactcagatccctctgtctacagccactggtacatcgttcacgagatcaccggaaatatccaccttcctctcctccgtccgctccaatcccaaatttgtcgggtcgtcagttacaatgccctggaaggtcgcgatcatgccacacctcgatgacttgaccgaggacgcgcggcaagccggcgcttgcaacacaatatacttgcgcaaggaagacgatgggaagacacagtatgttggcacaaatactgattgtattgggatccgggaagctctgctacaggggtcaccgaacggtgcggaacatttcaaaggaaagcctgcgcttatcgttggtggtgggggcactgcgcgaacagcgatctacgttctgagaaagtggctgggcgttagcaagatctacatcgtcaaccgggatgcgaaggaggtggaggcgattctcgcggaggataagcagcgaaacccgtcgccgcaggttgcgttggtccccgtctcagatccgtctgcggcggcgacgctcgaggcacccgttgctgttgttagcgggatccccaattacccgccgcagacagaagaggagatcagagctcgcgagacgctgcggctgttcctgaatcggcagacgcatgagaaggaccagggagttatcctggagatgtgctaccaccctcttccctggacggatattgcgcagatcgcccaggatgcgcggtggaaggttatccttggctcggaggcgctcatctggcagggtctcgagcaggcgagggtgtggaccgggaaagatgtagttagtgagccggggttagtggagaaggtgcaggcgtttgttgcgcagacgattgctgagcggtcgaagtcaaatttgtag

SEQ ID NO: 27972 - DNA, 1047 bp, Emericella nidulans
tgcatccccactatgcaatgggcccaggtcgccgagaaggtcggcggcccgctcgtctacaagcagatccccgtccctaagcccggtcccgaccagatccttgtgaagatccgctactctggggtttgccacaccgacctacacgctatgatgggtcactggccaatccccgtcaaaatgccgctcgtcggtgggcacgaaggagcaggaatcgtcgtggcaaagggcgaactggtccacgaattcgagatcggcgaccaagctggcatcaaatggcttaatggttcctgcggagagtgcgagttctgccgccaatcggacgaccccctctgtgcacgcgcccagctctctgggtatactgttgacggcacgttccagcagtatgcgctcggaaaggcgagtcatgcgtcgaagatccctgcgggcgttccggtggatgccgcggccccagtactctgtgccggtattacagtgtacaagggattgaaagaggccggggtccggccgggccagaccgtggcgatcgtgggtgccggtggcggcctgggatcccttgcacagcagtatgcgaaggcgatggggatcagggttgtcgcggtcgatgggggagatgagaagcgggccatgtgtgagtcgcttggaacagagacatatgtcgacttcaccaaatctaaagacctggtggccgacgtcaggcacggacgcggatgtctcggtgcgcacgcggtgatcctgcttgccgtgtcagagaagcccttccagcaagccactgaatatgtgcgctctcgcgggacaattgttgctattggcttgccgccagatgcgtacctcaaggcccctgtgatcaacacagttgttcgcatgatcactatcaagggcagctacgttggaaaccgacaggacggtgtcgaggctctggacttcttcgctcgcggcctgatcaaggctccgttcaagacggctcctctgaaggatctgccgaagatttacgagcttatggaacaaggcagaatcgccggtcgttatgtgctagagatgccagaataa

SEQ ID NO: 27973 - DNA, 1064 bp, Emericella nidulans
gagccgacatttgacatcccggactcgaccgattggctcgacacgccgttaacgcttctcgcgccttttgaaacgtccctccgctgccaggtctgcaaggactttttcgacaaccctgtgatcacgtcgtgcagccacacattttgctcgctatgtattcgccggtgtctgagtacagagggaaaatgccctacatgccggagctctgatcaggagctgaagttgcgtcgcaattgggtggtgcaggagctggtggaggggtttaagaatgctcgaccgagcatattacagctagctaggatggcacaaactggcacggatgatagtggagatttggctgcggaagagcctgcatcgaaaaagcggaaaatagagccgaatgccattgtcggcacagatggtcttcctgaggagggtattcgcacccgatcacagagtcgaggagctagtcggcagccacaagctactcctgttcaggtcatagatgatggtaatgatgaggactatatgccggacggcttggtgccgtgccctgtatgtggacggaggatgaaagaagaagccgtgttccgtcatcttgactcctgtactgggactgcagaggaactgaagccagcggcttataggtcgttagcacctggcccgcgcaaatcgttcctagcagccacgggaaaaccaccggaaagacttcctgttataaattattctctactgaaagatacggtgctacgaaagaaattgaaggatctgggcataccaaactggggcccgcgagctttgctgcaaagacgacatactgagtggttgaacttgtggaacgccaattgtgactctaggacaccgaaaccgaaacgagagttactgcgtgaattagacgtctgggagcggacccaaggaggaaattcagtcactcccaccgacccaacgaacgctgtaatgaataaggattttaatacggaagagtggtcggcgaactatgacacagatttcaaggcattgatcgcgaatgcgcgaaagaaaaacgatgctgttattcgctcaacaataccgaacgcttcccaagc

SEQ ID NO: 27974 - DNA, 1071 bp, Emericella nidulans
gcatcgaatcaatttaccattacatcgccgccgacggatgcgatttccgcgttgaagttctctcccgctcccgattcgacgcgattcgttgtatcgtcatgggataagaatgtttatgtctacgacttgcgggacgagaacggagctgcaggtgaagggaaattactacagaaattcgagcaccgtgccccggtgcttgacgcgtgtttcggagccactgaagacgagatctttacagccgggttggactgggatgtgaagaggatcgatatagcatctgctagtcaaaccgtcctcagcagccacgatgccggcgtccgcagcgttgtctacagtaaggagtacagcatggtcatatccgcctcgtgggataacacgttacatgtgcatcgccttgccggtgacaggagtgtcaccaatacggcttcaatacccctaccatcaaagcccttctccatgtctctcacagcaacgaagcttgttgtcggcatggcctcgcgagccctacacatttacgatctaaaatcactttcgctcttaacggggcagtcggaaggaggtgtggcgccggccaaggttgaagttgagccatggcagcgacgggaaagcagcctgaagtttatgacgcgctgcgttgcttgcatgcccgatgacgccggatacgcttcatctagcatcgaagggcgggtggctgttgagtggtttgatccctcagccgagtcgcaagcgcggaagtacgccttcaaatgccatcgacagacgtcggatgatgtcgatgtggtgtatcccgtcaactcgctggctttccatccaattcatggaacattcgcatctggaggcggtgatggtgtggtggccctttgggatggcatcgcaaagaggaggatcagacagtaccagaaatatccttccagtgtagcggctgtggcatttagctctaatgggaaatacctcgcaattgccatcagcccaggatacgaggatggaaaggatgatcttactgacgggacggtcaggatctatgtacgcgaactcggggagacggaagctaagggaaaaggcgcgaaataa

SEQ ID NO: 27975 - DNA, 1125 bp, Emericella nidulans
gaagaggaagttgctgctctcgttatcgacaatggttcgggtatgtgcaaggccggtttcgccggtgacgatgccccccgtgccgtcttcccctccattgtcggtcgtccccgtcaccatggtatcatgatcggtatgggtcagaaggactcctacgtcggtgatgaggcacagtccaagcgtggtatcctcacactcagataccccattgagcacggtgttgtcacgaactgggatgacatggagaagatttggcaccacacattctacaacgagcttcgtgtcgctcctgaggagcaccccgtcctcttgaccgaagcccccatcaatcccaagtccaaccgtgagaagatgactcagatcgtcttcgagactttcaacgtccccgccttctacgtctctattcaggccgttctctccctgtatgcttccggtcgtaccaccggtatcgtccttgactctggtgatggtgttacccacgtcgtccccatctacgagggtttcgctcttccccacgccatctcccgtgtcgacatggctggtcgtgacctgacggactacctgatgaagatcttggccgagcgcggatacaccttctccactaccgctgagcgtgaaattgtccgtgacatcaaggagaagctctgctacgtcgcccttgacttcgagcaggagatccagaccgcttctcagagctccagcctcgagaagtcctacgaactgcctgatggtcaggttatcaccatcggcaacgagcgcttccgtgctcctaaggctctcttccagcccagcgttcttggtctggaaagcggtggtatccacgtcaccactttcaactctatcataaagtgtgatgtcgacgtccgtaaggatctgtacggcaacatcgttatgtctggtggtaccaccatgtaccctggtatctccgaccgtatgcagaaggaaatcaccgcccttgcgccctcatccatgaaggtcaagatcattgctcctcctgagcgcaaatactccgtctggatcggtggttccatcttggcttctctgtccaccttccaacagatgtggatctccaagcaggagtacgatgagagcggtccttcgatcgtccaccgcaagtgcttctaa

SEQ ID NO: 27976 - DNA, 1153 bp, Emericella nidulans
gccttcttcttcaatcggggtcgatcccgccaaccatccgacgttgtgagatcaatcaaggacctgctgctgagactccgtgagccttcgaccgcttctaaggttgaggatgaattagccaagcagctatcacagatgaagttgatggtgcaggggactcaagaacttgaagcttctactgatcaggttcatgccctggtccaagctatgctccacgaggatctgctttacgaactcgcggtggctcttcacaaccttcccttcgaagcaagaaaagatacgcaaaccatattctctcacatactccgctttaagcctcctcacggaaactcgccagaccctcccgtcatctcttacatcgttcacaatcgtcctgaaattatcattgagctatgtaggggctacgagcacagccaaagtgccatgccatgcggcactatcttgagggaggcattgaagttcgacgtaatcgccgctatcattctttatgatcagtcaaaagagggggagccagctatcagactgaccgaggtccagcccaacgttcctcagcgcggaacaggtgttttctggaggttcttccattggattgaccgaggtacctttgagctcagcgcagatgcattcacaacttttagggaaatcttgacgcgccacaaatcccttgttacaggatatctagcgacaaacttcgattactttttcgcgcagtttaacactttcctcgttcagtctgagtcatatgtcactaagcgacagagcatcaaactcttaggcgagattttactcgatcgcgcaaactacagtgtgatgatgcgatacgtcgagagcggagaaaacctcaagctttgcatgaagctcctgcgtgatgatcgcaagatggttcaatatgagggatttcatgttttcaaggtatttgtcgccaatccggacaagtcagtggcagtccagcgaattctgatcaacaaccgggatcgcttgctaagattcctaccgaaattcctggaggaccgcacagacgacgaccagttcacggacgagaagagtttcctagtccgacagattgaacttttacccaaggaacccattgaaccatcacgttctgcgcgtgaaccgtctcgttcgactgccaacaccacgactgttgcgtaga

SEQ ID NO: 27977 - DNA, 1260 bp, Emericella nidulans
tccgccacggatcctactcccgctcgaacccctcggcttgaacaggccatcaccaatccggggaccgtcaagatcaatgttaagggagctttcattgtggacgatgaccctcggtccaagagtcctgtaagggaagagggcgttcactacgagggtcaggacattcgcctaccccatcatactggtgtggtaagccatgttgctgtcgatatcggcggttctctagcgaagctggtatacttcacacgtgagctggactcaccagacaatggcgggcggttgaactttatcaacttcgagactgatcggataaacctttgtctggaattcatcaaacggctgaaggaagagcaccgggattccaatggaggtaccaaggaggaactttgtgttgttgctacaggtggaggcgcctacaagtattacgacaaactcaaggaaacattgaacgtggacattatgcgggaagatgagatggaatgcctcataacaggacttgactttttcatcaccgagataccgaacgaaattttcacgtacagcgagactgagccgatgcaatttgccgaggcccgaccggatgtgtatccgtacctcttagtgaacatcggctccggagtgtctatgatcaaagtgtcggggccaaaacagtttcagcgtgttggcggaacgcacctgggtggtggaacattctggggcatcatgtcattattgactggcgcccgaacttttgacgacatgctagcaatggcggaccgaggggataacagcggcgtggacatgttagttggcgacatctacgggatggactacggaaagataggtctcaagagcacggccatcgccagcacatttgggaaggtcttccggttacagaaccgcgagcgggtggcgagcgatggggaggcaccgcaggacgggtctcgccaaaaggccgacgagccgatatttaagcacgaagatatgagcagaagcctactatacgccataagtaataatattggacaaatcgcatacttgcagtccgaaaagcaccaggtcaagcacatctacttcggtggctcgttcattcgaggacaccgacaaactatgaacacattatcctacgctatccgtttctggtccaaaggcgaaaagcaggcatactttctccgccatgagggctacatcggcgcagtcggcgcgtttctacgaagaaagccagttaactggggccgccggaacagtattgatgagcacgtgcctgctcaagggctctaa

SEQ ID NO: 27978 - DNA, 1296 bp, Emericella nidulans
cgaaatcagtccagcctgtccgatcgtctgaccgttgaagttgattgttcgtccctgggctccaacgagtgcccgtctatgacctcgagcttctcgccgctcgagtctcctacaccaactccaacaagtatatatagccagggctccctggaatcacccggttggcacggagcaggatcactccccaacaacacgtacgaacgaactcctggttctgcttcgatgcgcagtgcctttcgcctagcaggtatggcgtccacggagagtctgggacttccatacggtagcatggaagggcaggaacgaatgcctatgcccgactttctctctggatacgatgagaatattgaacaactgtggatgccctcagaagcacccaagtcttatgatcatgtcgctcaaggactcgcttaccatcaaggcatgcatcagtacccaaccatggcgcgcaacaccaacaacaactaccgtcaccaggcagctgcttacctaccagagtctacgaccaatccttgcctatcacggtcaatattccaccaacccgagcgagtcccgagttcgatgtcttcgtccatgtcaatgaataacatgttgccatggatgaatcttggggactcgattgcgccgcaaactattgcgccatcacaagttggcccagttactccaccaccatcatatacagactttccgacctctcttagtgcattcaaacaacatagccccactaccccaatcaggtcttgctcccttgggacagggtcaggggccgataccccgctgagccggctttcaggggggccgtgcgaatacatggacgatttccagccctcgccagtctaccgcgacgggtttcagaggccgcatcgcgtggcttctaggaagatgctccgacgacagacctctaagcaaaacttaatgctagagaacctaccacaggtcatcaagcaggtgcagttcaaatgcaaagagcctggttgcaacggccggttcaagaggcaagaacacttgaagagacacatgaagagccactcaaaagagaagccgcatgtatgttgggtaccaggttgtcaccgagccttctcacggagtgacaacctcaacgcccactatacgaagacccatagcaaacggggtggtcgcaatcgatacgtcgccacgctggacgagaacagccccgactacgacccagaattccgcgggcagctgacgccagacgggcgtcctatctacgggtcaaagctggatgaccccatcccgggcgcgggcgatatgagcctggacggctgggatgaatga

SEQ ID NO: 27979 - DNA, 1311 bp, Emericella nidulans
tccgacccttcaccgaaacgtttcgagaccctccagctccatgcgggccaggagcctgaccctgcaactaattcccgggctgtcccaatctatgcgacaacgtcctacaccttcaatgactccgcacacggcgccaggctttttggcctcaaagagtttggcaatatttacagccgaattatgaatcccacagtcgatgtcttcgaaaaacgtattgctgcactcgagggaggtgtcgctgcggtggctgcctcatctggccaggcagcccagttcatggccatctctgctctagcccatgctggtgacaatatcgtttccacaagtaatttgtatggtggtacatacaatcagtttaaggtccttttcccacgactgggaattaccacaaaattcgtgcagggagacaaagcagaggacattgccgccgctatcgatgaccgtaccaaggccgtctacgtcgagacaataggaaaccctcgctacaatgtgcccgactttgaggtcattgcaaaagtagcccatgagaagggaattccccttgtggttgacaacaccttcggtgccggaggctactttgttcgacccattgaacatggcgccgacattgtcgtgcacagtgcaactaaatggattggaggtcatggcacaaccatcggaggcgttgtcgtggacagcggcaaattcgactggggcaagaacgccgcgcggtttcctcagttcacgcagccttctgaaggttaccacgggttgaacttctgggagaccttcggccccattgccttcgcgattcgtgtccgggtcgaaatcctgcgcgacctcgggtccgcgctgaaccctttcgccgcgcagcagctcatcctgggtctggaaaccctaagcttgcgcgctgagcgtcatgcttccaacgctctggccctcgccaactggctaaagaagaatgatcacgtcagctgggtttcttacgtgggcctagaagagcactccagccacgaagttgcaaagaagtacctcaagcgtgggttcggcggtgtcctatcctttggtgtcaagggtgaggcagccgtcggtagccaggttgtcgacaactttaagctcatctccaatctagcaaatgttggagactccaagaccctcgcgattcacccctggagcaccactcacgagcagttgaccgaccaggagcgaatcgattctggtgttacggaagatgccatccgcatctctgtcggcactgagcacatcgacgacatcatcgccgactttgaacagtcatttgcagcgaccttcaaagttgtccggagtgcttag

SEQ ID NO: 27980 - DNA, 1311 bp, Emericella nidulans
tccgacccttcaccgaaacgtttcgagaccctccagctccatgcgggccaggagcctgaccctgcaactaactcccgggctgtcccaatctatgcgacaacatcctacaccttcaatgactccgcacacggtgctaggctttttggcctcaaagagtttggcaatatttatagccgaattatgaatcccacagtcgatgtcttcgaaaagcgtattgctgcacttgagggaggtgtcgctgcggtggctgcctcatctggccaggcagcccagttcatggccatttctgctctagcccatgcgggtgacaatatcgtttccacaagtaatctgtatggcggtacatacaatcagttcaaggtccttttcccacgactgggaattaccacgaaattcgtgcagggagacaaagcagaggacatcgccgccgctatcgatgaccgtaccaaggccgtctacgtcgagacaataggaaaccctcgctacaatgtgcctgactttgaggccattgcaaaagtcgcccatgagaagggcattccccttgtggttgacaacaccttcggtgccggaggctactttgttcgacccattgaacatggcgccgacattgtcgtgcacagtgcaactaaatggattggtggtcatggcacaaccatcggaggcgttgtcgttgacagcggcaaattcgagtggggcaagaacgccgcgcggtttccccagttcacgcagccttctgaaggttaccacggcttgaacttctgggagaccttcggccccattgccttcgcgattcgtgtccgggtcgaaatcctccgcgacctcgggtccgcgctgaaccctttcgccgcccagcagctcatcctgggtctggaaaccctaagcttgcgcgctgagcgccatgcttccaacgctctcgccctcgccaactggctaaagaagaatgatcacgtcagctgggtttcttacgtaggcctagaagagcaccccagccacggagttgcaaagaagtacctcaagcgtgggttcggcggtgtcctatcctttggtgtcaagggtgaggcagccgtcggtagccaggttgtcgacaactttaagctcatctccaacctagcaaatgttggagactctaagaccctcgcgattcacccctggagcaccactcacgagcagttgaccgaccaggagcgaatcgattctggtgttacggaagatgccatccgcatctctgtcggcactgagcacatcgacgacatcatcgccgactttgaacagtcatttgcagcgaccttcaaagttgtccggggtgcttag

SEQ ID NO: 27981 - DNA, 1317 bp, Emericella nidulans
tcggcttccagtacgctgaaaaaagcattccctcaggtcgacgctgagggccataatctgcccccttcacctgccccgtcgagtcctcatggcagcaggcgctacaacatcgcaactgagcttgtctacaccgagagcaatgaccagtacaatgccagcagtgtcccaatttaccagagcgcaacattcaagcagtcatcccacgagggaggaggcgagtatgactatacccggtccggcaacccgactcgaacgcatctcgagcgacacctggccaagatcatgtccacgcagcgcgctctcgtcgtgtcttccggaatggcggccctggatgtgatcacccgtcttctccgacctggcgacgaggtggtcactggtgatgacctgtacggtggaaccaaccgtctactcaaatacctctcaaccaacggcggcattatcgtgcaccacgtcgacaccaccaaccccgacaaggtgaaggaagtcctgaccgacaagacagccatggtgctcctggaaaccccaaccaatccgcttatcaagattgtcgatatccctacaattgccgcggcgtcgcacgaagcgaaccctaactgtctagtcatcgtggacaacaccatgatgtctccgctcctgctcagcccgctcgaactcggcgcggacgttgtctacgagagcggtacgaaatacctgtccggccaccacgatgtcatggccggagttattgcagtcaacgacccggccctcggcgagaggctctacttcccgatcaacgcgtccgggtgcggactgtcgcccttcgactcttggctgctcatgcgcggagtcaaaactctcaaggtccgcatggatcagcagcaggcaaacgcacagcggatcgcagaattcctggagtcgcacggtttcaaggttcggtatccgggtctgcgctcgcacccccagtacgaactgcaccactccatggcccgaggagcgggcgccgtgctttcattcgagacgggcgatgtctctgtcagtgagcgcattgtcgcgaacgcaagtgtgggctatcagcgttactttggctgtgtcaacacgttgatcagtcttccctgccggatgagccatgccagtatcgatgcagagacgcgaaaggagcgtgccatgccggaggatctgattagactttgtgtgggcattgaagacgtagacgaccttattgacgacttaagcgagcgctggtacaagctggcgctgtcaacgtcactctggacggcattgaagcgaacacgccgcagtcagcgtagtcaagtaatgaaggaatatggttatggatga

SEQ ID NO: 27982 - DNA, 1329 bp, Emericella nidulans
gagccgacatttgacatcccggactcgaccgattggctcgacacgccgttaacgcttctcgcgccttttgaaacgtccctccgctgccaggtctgcaaggactttttcgacaaccctgtgatcacgtcgtgcagccacacattttgctcgctatgtatccgccggtgtctgagtacagagggaaaatgccctacatgccggagctctgatcaggagctgaagttgcgtcgcaattgggtggtgcaggagctggtggaggggtttaagaatgctcgaccgagcatattacagctagctaggatggcacaaactggcacggatgatagtggagatttggctgcggaagagcctgcatcgaaaaagcggaaaatagagccgaatgccattgtcggcacagatggtcttcctgaggagggtattcgcacccgatcacagagtcgaggagctagtcggcagccacaagctactcctgttcaggtcatagatgatggtaatgatgaggactatatgccggacggcttggtgccgtgccctgtatgtggacggaggatgaaagaagaagccgtgttccgtcatcttgactcctgtactgggactgcagaggaactgaagccagcggcttttgggtcgttagcacctggcccgcgcaaatcgttcctagcagccacgggaaaaccaccggaaagacttcctgttataaattattctctactgaaagatacggtgctacgaaagaaattgaaggatctgggcataccaaactggggcccgcgagctttgctgcaaagacgacatactgagtggttgaacttgtggaacgccaattgtgactctaggacaccgaaaccgaaacgagagttactgcgtgaattagacgtctgggagcggacccaaggaggaaattcagtcactcccaccgacccaacgaacgctgtaatgaataaggattttaatacggaagagtggtcggcgaactatgacacagatttcaaggcattgatcgcgaatgcgcgaaagaaaaacgatgctgttattcgctcaacaataccgaacgcttcccaagcgaattcggatacgccgcgaagcgcccaactcgttgatcagcctatcgaagcttcgctaactccgcaagatgtggacgagaaaagcacaatgaatcctcaggatgctatcgacaatagaacagaggttcccccggtaccagatcctccccaagcattaagcgggatagatcgtgcggtgaattcgccgatgaagaatgtgaccgagggcgatgcccaggcgattcccatctccagcagtgcgtccacccataaaacgccgcattga

SEQ ID NO: 27983 - DNA, 1341 bp, Emericella nidulans
cgtgagatcgttcaccttcagaccggccagtgtggtaaccaaattggtgctgctttctggcagaccatctccggtgagcacggcctcgatggctccggtgtttacaatggtacctccgaccttcaactcgagcgtatgaacgtctacttcaatgaggccagcggtaacaagtacgttccccgtgccgtcctcgtcgatctcgagcccggtactatggattgcgtccgcgccggtcccttcggcgagctcttccgtcccgacaacttcgttttcggccagtccggtgctggtaacaactgggccaagggtcactacactgagggtgctgagcttgttgacaacgtcgtcgatgttgtccgtcgtgaggccgagggttgcgactgcctccagggtttccagatcacccactctctcggtggtggtaccggtgccggtatgggtactcttttgatctccaagattcgtgaggagttccccgaccgcatgatggccaccttctccgtcgttccctctcccaaggtctccgacaccgttgttgagccttacaacgccaccctttccgttcaccagctcgttgagcactccgatgagactttctgtattgacaacgaggctctctacgatatctgcatgcgcaccctcaagctctccaacccctcctacggtgatctgaaccacctcgtctccgccgtcatgtccggtgtcaccacttgccttcgattccctggtcagctgaactctgacctgcgcaagtgggctgtcaacatggttcccttccctcgtctgcacttcttcatggtcggcttcgctcctctgaccagccgtggcgcctactccttccgcgctgtttccgttcccgagttgacccagcagatgttcgaccccaagaacatgatggctgcctctgacttccgcaacggccgctacctcacctgctccgctatcttccgtggaaaggtctccatgaaggaggttgaggaccagatgcgcaacatccagagcaagaaccagtcctacttcgtcgagtggattcccaacaacatccagagcgctctctgctccattcctccccgcggcctcaagatgtcttccaccttcattggaaactctacttccatccaggagctcttcaagcgtgtcggtgaccagttcactgctatgttccgtcgcaaggctttcttgcattggtacactggtgagggtatggacgagatggagttcactgaggctgagagcaacatgaacgatctcgtctccgagtaccagcagtaccaggacgcctccatctccgaaggcgaggaggagtacgccgaggaggagatcatggagggtgaggaataa

SEQ ID NO: 27984 - DNA, 1347 bp, Emericella nidulans
cgtgagattgttcatctccagaccggccagtgtggtaaccaggttggttctgccttctggcagaccatctccggcgaacatggcctcgacgcctctggaatttacactggcgactccgatctccagctcgaacggatgaacgtctacttcaacgaagctggcggtaacaaatacgtcccgcgcgcggtgcttatcgatctcgaacccggcaccatggatgccctccggtccggtcccaacggagctttgtatcggccagataatttcatctacgggcagtccagtgcgggaaacaactgcgccaagggccactatactgagggtgcagaattggtggatcaggttatcgatgtcgtgcgccgggaagcagagagctgcgattgtctgcaggcgttccaggtgacgcactcgctcggtggcggaaccggctctggaatgggcacgctgctcatttcgaagatcagggaggagtttcccgatcggatgatggccactttttcggtcatgccgtcgccgaaagtgtcggatacggtggtggagccgtataatgcgacgttatcggtgcatcaacttgtcgaacattcggacgagacattctgcttggataacgatgctttgtatgacatttgcatacggacattgaagctgtcttcgccttcttatggtgatctcaaccatctggtgtctgctgtcatgtcgggcatcaccgtcagtctgcgtttcccagggcagctgaactctgacctgcggaaactggccgtcaatatggttcccttcccgcggttgcatttctttatggtcgggtttgcccctttgactagccggagctcttcatctttccgtacaatatctgtgcctgaactcactcaacaaatgttcgattcacggaacatgatgacagctgccaactaccagaacggccgctttttaacctgctcaaccctgttccgcggcaaagtcgccatgaaagaagttgaagatcaaatgcgcaacatgcaaaacaagtactcttcctactttgttgaatggatccccaacaacgtccaaactgctctgtgctctatgccacccaagggcctgaaaatggcagctactttcgtcggcaattccacctctgtccaggaactcttcaaccgcgtctccaaccagttcacagccatgttccgacgcaaggcattcttgcactggtatactggcgaagggatggatgagatggagttcactgaggctgagagcaacatgaacgatctcatgagcgagtaccagcagtaccaggaggcgacggtttcggatggagaaggagcgtatgacgctgaagagggggaggcatatgagcaggaggagtag

SEQ ID NO: 27985 - DNA, 1441 bp, Emericella nidulans
gagccgacatttgacatcccggactcgaccgattggctcgacacgccgttaacgcttctcgcgccttttgaaacgtccctccgctgccaggtctgcaaggactttttcgacaaccctgtgatcacgtcgtgcagccacacattttgctcgctatgtatccgccggtgtctgagtacagagggaaaatgccctacatgccggagctctgatcaggagctgaagttgcgtcgcaattgggtggtgcaggagctggtggaggggtttaagaatgctcgaccgagcatattacagctagctaggatggcacaaactggcacggatgatagtggagatttggctgcggaagagcctgcatcgaaaaagcggaaaatagagccgaatgccattgtcggcacagatggtcttcctgaggagggtattcgcacccgatcacagagtcgaggagctagtcggcagccacaagctactcctgttcaggtcatagatgatggtaatgatgaggactatatgccgggtaggtttttcaacgcgttcatcgctggtatccactaactttggtttgcagacggcttggtgccgtgccctgtatgtggacggaggatgaaagaagaagccgtgttccgtcatcttgactcctgtactgggactgcagaggaactgaagccagcggcttttgggtaagattcccataccgctagtgcgaggttgctatacatagtgctaatccagtgcctataggtcgttagcacctggcccgcgcaaatcgttcctagcagccacgggaaaaccaccggaaagacttcctgttataaattattctctactgaaagatacggtgctacgaaagaaattgaaggatctgggcataccaaactggggcccgcgagctttgctgcaaagacgacatactgagtggttgaacttgtggaacgccaattgtgactctaggacaccgaaaccgaaacgagagttactgcgtgaattagacgtctgggagcggacccaaggaggaaattcagtcactcccaccgacccaacgaacgctgtaatgaataaggattttaatacggaagagtggtcggcgaactatgacacagatttcaaggcattgatcgcgaatgcgcgaaagaaaaacgatgctgttattcgctcaacaataccgaacgcttcccaagcgaattcggatacgccgcgaagcgcccaactcgttgatcagcctatcgaagcttcgctaactccgcaagatgtggacgagaaaagcacaatgaatcctcaggatgctatcgacaatagaacagaggttcccccggtaccagatcctccccaagcattaagcgggatagatcgtgcggtgaattcgccgatgaagaatgtgaccgagggcgatgcccaggcgattcccatctccagcagtgcgtccacccataaaacgccgcattga

SEQ ID NO: 27986 - DNA, 1491 bp, Emericella nidulans
tctgatttgttcaccaccatcgagactccggtcatcaaatatgagcagcctctcggcctgttcatcaacaacgagttcgtgaagggcgttgagggcaagaccttccaggtcatcaacccctccaacgagaaggtcatcacctccgtccacgaagccaccgagaaggatgttgatgtcgccgtcgctgctgcccgtgctgcctttgaggggccatggcgccaggtcaccccctctgagcgtggcattttgatcaacaagctggcggatctgatggagcgtgatatcgacaccctcgccgctatcgagtctctcgacaacggcaaggctttcaccatggccaaggtcgatcttgccaactccattggttgcttgcgatactacgctggctgggcggacaagattcacggtcagaccattgacaccaaccccgagactcttacctacacccgccacgagcccgttggtgtttgcggtcagatcatcccctggaacttcccccttctgatgtggtcctggaagattggacccgctgttgccgctggtaacactgttgtcctcaagaccgcccagcagacccctctctccgccctttacgctgctaagctgatcaaggaggctccattccccgctggtgtgatcaacgtcatctctggctttggccgtaccgctggtgctgccatctccagccacatggacattgacaaggttgccttcactggctctactcttgttggacctaccatcctgcaggccgctgctaagagcaacctgaagaaggtcactcttgagctcggtggcaagtctcccaacatcgtctttgatgatgctgacattgacaacgccatttcctgggccaactttggtatcttcttcaaccacggccagtgctgctgtgctggatcccgtatcctggtccaggagggcatctacgacaagttcgtcgcccgcttcaaggagcgtgcccagaagaacaaggtcggaaaccccttcgagcaggacaccttccagggtccccaggtttcccagctccagttcgaccgtatcatggagtacatcaaccacggcaagaaggctggtgctaccgtcgccaccggtggtgaccgccacggcaacgagggttacttcatccagcctactgtcttcacagacgtcacttccgacatgaagattgcccaggaggagatcttcggtcctgtcgtcactatccagaagttcaaggatgtggctgaggctatcaagatcggcaactcgaccgactacggtcttgctgctgccgtgcacacaaagaacgtcaacaccgccattcgcgtgtccaacgctctgaaggctggtaccgtctggatcaacaactacaacatgatctcgtaccaggctcccttcggtggcttcaagcagtccggtctcggccgtgagcttggctcttacgctcttgagaactacacacagatcaagacggtgcactaccgcctgggtgatgctcttttcgcttaa

SEQ ID NO: 27987 - DNA, 1512 bp, Emericella nidulans
cccggcgttgagaaatcctcacaaaacgaatcgagacttcttctcgtttcaaatcggttacccatcaccataaagcgatcagaagatggcaaatatgatttttccatgtcatcaggtggcctcgttagtggtttgagtgggttatcgaaaaccacaaccttccagtggtacggctggcccggtctggaggttccggaagaggagatcccgactctgaagaaccggttaaaggaagaatataacgctattccggtctttatcgatgatgagcttgcagacagacactacaatgggttttctaactccatcctttggccacttttccattaccaccccggcgaaatcacattcgacgagtctgcttgggaagcttataaagaggcaaatcgtctatttgcacaggctgttgcgagccaagttcaggatggcgacttaatttgggtgcatgactaccatttgatgctcctacctgaaatgctccgagaagaaattggaaacaccaagaaaaacatcaagattggtttcttcctccacactccattccccagcagtgaaatttaccgaattctgccggtacgaaacgagctattgcttggacttctccactgtgacctcatcggtttccacacttatgactacacgagacatttcctcagtgcttgctcgcggttgctgggactgccaaccactcctaatgggatagaattccagggaaagataatcgcttgcggcgctttccctattggcattgatccggagaaattcaaggaaggcttgaagaaagaaaaagtccaaaagcgtattgcaactttggagcagaaattccagggcgtgaagcttatggtaggcgttgaccggctggattatatcaagggcgttcctcaaaagctccatgcccttgaagtattcctgagtgaccatcctgaatgggtgggcaaggtggttcttgtccaggtcgccgttcccagtcgtcaagatgtagaagaataccagaatttgagggctgttgtgaacgaattggtgggcaggataaacgggaaatttggaactgtcgaatttatgccgatccattttctccacaaatcggtgaatttcgatgaactcattgctctctacgccgtgtccgatgcatgcgtcgtttcttccacccgagatggaatgaacctcgtttcgtacgagtacatcgctacccaggagaagcgccacgggtcgttagtcctgtctgaatttgctggtgccgcccagagtctcaacggaagcataatcgttaacccttggaatactgaggagcttgcagcggcttaccatgaagccgtgacgatgagtgatgaacagcgagcgcttaacttctcgaaactggataaatatgtcaacaagtacacaagtgccttttggggtcaatcctttgttaccgaattgacaagaatttcggagcaagccgcagggaaacttcccaccaaagagactcctgtgaacggagagacgtcaaagctagagacttcgtcacagtag

SEQ ID NO: 27988 - DNA, 1518 bp, Emericella nidulans
attctgcctctgatattggtcttgtatctgctctctacggcggcttaccgtctatggctgcatcccgtgcgcaactaccctggcccgtgctggtgggctgtttggcgagttccatatctgaagggcaccattcgagggacgattgtcagagatatccagcgattgcataaccagtatggtcccgttgtacgaatcgcgccagatgaactttcctacatcacgccagaggcagcaaaaccaatctacacgtccagtcccgaattccccaaagacccaatgctactccctccgtttcataatggcgcccctggcattctcgctgccgactacgcccaccatcggcgatatcgacggcttcttgcctctgccttctctgaaaagggacttcgcgcacagcagggcatgattcagagccatattgatcgactaatgactcgtctccaggggaattgctcgtcgggctcgctggacatgaccgtctggttcaactgggcgaccttcgatatcatcggcgatctcgctttcggggagccgttcggctgtctcgagagaatggagactaacccatggattgcctcaattcagggcaacgtcaaatccatcccgatcctaaacgctctacgtcggtaccgtctggacaggctcattgagttcctcgcgcctcccaggctactggagatgcgacggcgtaatgcgcagttcacagcagaaaaggtcgatcgccgactgaagcatgcaacgaccacgcgcggcgacctgtgggactcggtgctggccgaccctccagatggtgagcctccgatgtcgcgcgccgagatggtcagcaatgccagcgcaatcgttcttgcggggagcgagacgtcggcaaccactctgagcgggtgtctttggctgcttctcacgaaccctgagtatctgcagcagctcactgagcgtatccgcgctcggttcagcacggccacagtcattgatgcacagacggtgacgcagatccaggggctccaggcggtccttgacgagtcgctacgcctatatcctgcagtgccaatgcaaagcaaccgtattgttccaccaccgggcgcccgtcttgcaggcagctgggttccgggagggacctcggtcgccgtccaacagtttgctgcctgtcgctcccccaccaactttcaccgtccagacgagtttattcccgagcggtgggaaaaggaaggtgagttcatcaatgatcggcgggaggcctcgcagccatttagcattggtccccgcaattgcatcggacgccagttggctcttgccgagatgcggctgatcctggtccacctcttatggcactttgatatagaactggaccggcggcgcatggaaaatatggactggatggcggtgcaggggatcttggatcctgtgggacaagaaaccgctgtgggttgtgttgaagaacagaagtacgtaggcaccaaagtctttgcagcgctagtatggatgctagtactgccactgtacagcttattgctttactaa

SEQ ID NO: 27989 - DNA, 1698 bp, Emericella nidulans
gccgacattgctacaagggacgttcgccaacctatcgacattgccgagtacctcttccgccgtctacacgaagttggaattcggtcagtgcacggtgttcccggggattataacctcgctgcactcgattacttgcctaagtgtggacttcattgggtggggaactgcaatgaactcaatgcgggttatgcggccgatggctatgctcgagtcaacggaatcgctgctctagtcacaacattcggagttggtgagctctctgcgatcaatgccattgcgggacgctactcggaattcgttcctatcatccacattgtcggtcaacctcattcaaggtcccagaaagatgggttgctgctacatcatactcttggtaacggagattataacgtattttcgtcgatgaacaagggaatatctgtgactacagcgaacctgaacgatacttacgatgctgccaccctcatcgataatgctatccgtgaatgttggatccacagccgacctgtttatcttgccctacctactgatatgatcacgaagaagattgaaggcgaaaggctcaagactcccattgacctttcattgcccgccaatgatcctgagaaagaagattacgtactggtcgatgctcgtgctcaagtatttgcacgctcagctaagaaccctgttatcctagtcgacgactcctgcgtattcgacgactccaccggcttgtcacttgaggaagtgcatgacttgatagaagtatctgggctgcctacttttgtagccccgatgggcaaaggcgcagttaatgaaactcatagatgttatggcggtgtttatgcaggaaccgggtcaaaccctggggttcgcgagcaggtggaatcttcagacctcatactcagtattggtgccatcaaatccgactttaacacggctgggttctcataccgcattggccagttgaatacgattgacttccacacgacctacgtgcgcgtgagatactctgaatatcctgacacgaacatgaagggagttttacgcaaggtcattcaacgactgggctttatcaaggctgaccctgtcccacacatatcgaacgcacttccggaacatgaaaaaaattcgagcgagcagagaatcactcatgcttggatgtggcccatggttgggcaatggctgaaggagaatgacattgtcattaccgagactggaacggcaaattttggaatctgctggaacctcctcccatctgagttacagccaatcagccaggtcctttggggcagtattggttattcggttggcgcctgtcagggtgctgctctagctgcaaaggaacagggcaatcgccgaacggtgttgtgggtgggcgacggcagcctgcaacttactctgcaggaaatcagcaccatgatcaggaataatctcaacccaattatcttcgtcatctgcggcgagggttataccatcgagcggttcatccacggatgggatgaaagctacaacgacatccagacctgggatatcaagggcctccctgttgcgtttggcggcaagggcagatacaagggttacaaagttacgaccagggacgagctcaccaagctgttcgctagcgaagagttctcctccactccatgcttgcaggtgagtctttgtgacctcactcattacttatcagatgctaattttgagcagttaggttga

SEQ ID NO: 27990 - DNA, 1845 bp, Emericella nidulans
gttatctttctcttgaaactcaggaataaaagcgactgcgatgccagcatgatagggccgggcctggaccattcaccagcaccagcagtcggccctgatccctattcgagtgacgacagcatggacaactccatccattcaaccgacggccccgactccgtcatccccaactccaaccccaagaagaccgtccgacagagagtccgcttgctggctaggcatctgacgacccgcgagggcctgatcggcgactatgactatggcttccttttccggcccgagctacccttactgaagaaagatccacgggcggcgcctttttttggcctcaacgagaagattcccgtgctgttggcgtttatcctgggtcttcagcatgcgcttgccatgttggcgggtgtggtcactcctcctctgatcatatcaagctcgctgagcctgccgtccgatctccagcagtatctcgtttcgacctcgcttatcgtctgcgggctgctgtcgatggtccagataacgcgatttcatatctacaagacaccgtactatatcggcagtggcgtcctctcagttatgggggtctcgttctccatcatctccgtcgccagcgggcccttcaaccagatgtactcgaacgggttctgtcaactcgacgaggctggaaacagactcccttgccccgaagcgtacggccgcttgattggcacctcggcctgctgtgctttggtggagatcctcctcgctttcgtgcctcccaaagtgatacagaaaatcttcccgcccatcgtcactggtcccactgtaatgcttatcgggataagtctgattggaactgggttcaaagactgggctggcggctcggcgtgtatggatgacgggatgctgtgcccgtccgcaactgcaccgcgccctctcccgtgggggagtccagagttcatcggcctgggttttctcgtctttgtatcgatcatcctctgcgaacgatttggagccccgattatgaagtcctgttctgttgtcatcgggctgctcgtcggttgtatagtcgctgcagcctgcggctacttcagccacgccgatattgacgctgcccctgccgcctcattcatctgggtcaagactttccctctctctgtctatggtccgatggttctcccgatcatcgcggttttcatcatctgcgcctgcgagtgcatcggtgatgtaaccgccacctgcgacgtctcgcgtctcgaagtccgcggcggcacattcgagtcgcgcatccagggcgccgtcctagcagacgggatcaactcggtagtcgctgcccttgcgacaatgacccccatgacgacctttgcgcagaacaacggcgtgattgccctcactcgctgcgcaaaccgctgggccggatactgctgctgtctgatattgatagtagccggtatctttgctaaattcgctgcagccattgttgccatacccaacagtgtcatgggcgggatgaagacgtttctcttcgcttcggtcgttattagcggacaggcgatcgtggccaaggcgccgttcacaaggcgaaatcggtttatcctcaccgcgtcaatggccctgggatacggggcgacgctggtgcccacttggtttgggaatgtattccctcagaccgagaatagagacctggaggggtttgaaaatgcgatcgagctcgtgcttgagacggggtttgcggtcacggcatttgttgctatgctcttgaacgcaatcatgcctgctgaagtcgaagagatcggtgccgtcacccctatgccggtctctgctcatgataatcgggatggcgaggcggagtatcagagcaagcaggcttag

SEQ ID NO: 27991 - DNA, 2394 bp, Emericella nidulans
gcctcaaatatcctccagattcccttccgccgctcgcacactgtctccctctcgaccgccttgacccaatacatttccaccaaatatgaccagcggcctgacatgtttgcagatgacttgctcattatcgatcggttacgaaatgaggccataaacgtgcaggaaccacatgtcagcggaatcagccggctggttacttacgccgcgcaactgaaatggcttgggggaaagtttccagttgatgtcggggtcgagttcccctggtatcctgcttttgggttcaacacaagtcggccagtctcacaggataacatccgcttcgagctggcaaacgtcatcttcaacctcgccgcactctactcccagctcgccttcgccgtaaaccgcacaacaaccgacggtctcaagcaagcatgcaactatttctgccaggcagccggtatcctagcacacctccgaacagacatcgtccctgacatgcgctccgccccgccggaagacatggacgagatgaccctccgaagcctggaagagctgctcctcgcacaagctcaggaatgtttctggcagaaggccgtgatggatgggctaaaggatgcatcaattgcacgactcgcgggccaagtgtcggacttttatggcgatgcgtgcgatcacgccgtcaagtcgaatgcgatcagccccgaatggatccaccatatgacggcgaaacagcatcattttgcagctgcagcgcagtatcgccagtcgctggattgcctggagaagcgcaagtatggagaggaggtggcacggttacgggacgctgtggcttgtgtgaatgaagcgctcaaagagagccggtggatcaatcgcacggtgctgggtgatttgcaggggttaaagaatagagtaacggaggatttgaagcgcgccgagaaggacaacgatatgatttatctcaaccccgtgccgcccaagtcggagctcaagcttattgatcgggcgtgtatggttgcggctaaggcgccgtcgcaggtcacggacgcaatctcgatgctgggggaaaaagggccgttgggacagccgctcttttcgaagctcgtcccgtatgccgtgcacattgcggcgagcatttactcggacaggagagaccgtcttgtcaatgagcggattatcggcgaattggagaacatgacggacaagctacgcgatctactatcatcgctcaatctccccggctcgctgcaagcccttgagaagcccctgggcctgccgccatcactggtcgcccatgccgaagaaatgcgtcaacaagacggcctcaaccgcctccgcaagtcccttctcgacatcgccaaagtcaaatccaacgaccgcgccgtctataccgaaggcgtggaactcctcgccgctgaaaaagctgaggacgacgcttcgcgccggaaatttggcaccgaccgctggacgcgcgaggcctctgaagccgccgctcctaaactctacaccaccgcccgggaaatcgacggctacttcacctcagcgcagagcagtgacaacctggttgagcagaaactgcacgactcggaagctgtctttcgcgttttgaccggcacgaatcgcgaccttgaggcttttgtcccaagtagtcgacgcgcaacgataccgcctgaagtcgaacgcgaggtgagtcggctccgcagctgcatcagcgaagtaaatcgactcgaaagccggcgaaagcgcaaggctcaggccgtcaaggacaaagcgcgcgcggacgacatcagttctgcacttgtccgcgaggcagcacgtttagagcgcgagttcccaatgcaggctatccaggctagtcaattcgaggacctctttgaatcacgactgcgcgattacgacgtcgatctagatatggttgcgcaggagatgcacgatcaggatcagatcgtcgcgcaggtgcgggacgcgaatcgtgcgtttacgcgcgcccatacgggtgatgcttctacaaaggagcgtgagaaggcgctccaggagctggagaacgggtacctgaagtataaggagatcatttcaaatatcgaagtcggacggaagttctataatgatctcgcgaagatcgtggggcggttcagggatgatgtcaaggcgtttgtgcataagaggcgtatggaggctagtcagcttgagcaggacatatccagcgtcgccgcaatggcatccctgaatatctcgcctatcaggcaaccaccccagcaaacggtagtttcagccccagtttcagtctctgccgcggcgtcagttccagcgccgacacattttaatccagtcaaaccccaacctcaacctccgtcgcaggcaatcccaccacagtcacaaccacaaggcgaaccgcaaccctgcggacacctctaa

SEQ ID NO: 27992 - DNA, 2412 bp, Emericella nidulans
gaagctccccgctcacatccggctcctgagccgaagataaggcctaccacagtggatggaggcttgcccgatcaggttaagaccaagagtggtgggatcacattcgcacaccaagactctctgccgaagttacctatcccggatcttgagagcacatgcaagaaatatctcgacgctctgtcgccgctgcagactcctaaagagcaagaagagaccaaggctgctgtacgggagttcctcaaaggcgagggtcccggccttcaagagcggctgcagaaatatgccacatcgcaaacgagttatattgaacaattctggtacgactcctatctgaattacgacagtcctgtcgttctcaacctcaaccccttcttcttgctggaggacgatccaacacctgcgagaaacaaccagctgactagagcggcatcgctggttgtttcggccttatcatttgtgcgcgctgtcagacgggaggagttgcctcccgataccgttcgaggtacgccattgtgcatgtatcaatattcccggctatttggtactgcacgtgttcctactgagaatggctgcgttatcagccaagatcccaagtcaaagcatatcgttgttatgtgccgtggtcagttctactggtttgacgtcctcgacgagaatcatgaccaaatcatgacagaaaaggatatcgcaatgaaccttgaggttattctcgctgatgcagaacaaaccccaattcaagaggcggcgaagggcgcccttggagtcctcagtactgaaaaccgcaaggtgtggtcgggattgagggatatcctaaccaaagatgagcattcaattaacgctgagggcttaaacattgtggatactgccctatttgtcctctgcctggatgacaccgagcctcataacatgtccgagctttgcgcgaacatgctctgtggtacgaacgtggtggaaaagggcgttcaagtgggtacttgcacgaaccggtggtacgacaagctgcagatcatcgtgtgtaagaatgggagtgctggaatcaattttgagcacactggtgttgacggacatactgttcttcgcttcgcgagtgacgtctacacggacacgattcttcgctttgcacgaaccatcaacggccaggctcccagcttgtgggcaaccactagccctgacccgtccaaacgacaccctcgaagcttcggtgacgttagcccgacccccagaaaattagaatgggacatgttgcctgagcttagcattgctatccggtttgccgaatcgcatctcgcagatcttcttcagcagcatgaattccaagtgcttgatttcaagggattcggaaagaactttattacctcaatgggattctcaccggacgcattcgtccagatggcgttccaggcggcttactacgggctttacggacaagtggtaaatacctatgaaccagcaatgaccaaggctttcctgcatggacggaccgaagccattcgatctgtcaccaatgaagccctcgacttcgtgaagacattttgggctgaaaaccctgctgaggataaggtgaatgcccttcgaaaggctactgagaagcactcggcaatcacgaaggaatgctccaagggacaaggacaggaccgtcacctctatgctctttacaccctgtggcagcgacaattcgacgaagcccctagctcccggaacaacagcgtcgatgaagcgtcgaacgggtacacgagtcctgctgagatcgactccatcgctgggtctcctctatccccgtcctctgtatctgaggtggatgggttgtcatccactggcagctatggccgggctatgcgtaatttgcctcccactcccgccatcttcagcgaccccggctgggacaagatcaacaacacaattctttccacttcaaactgtggcaacccctgcttgcggcatttcggcttcggcccaacatctgcagacggattcggcattggctacattatcaaggacgactcaatctcaatttgcgcctcatctaagcaccgccaaaccgcgcgtctcatgcagacacttgagttgtacctgcttgagatccgcaagttgctgcgcgcgactgtccacaagccgtccagcccgcggaccagccgcgctcgtgaaatggagatgattgccgagcgggtccagcgtgatcaacgccggggtcgtattgtccgcacagacgcgggccatctgcgggccggtaccgagacgcccacgacggacagcggggacatggacgatgatggcatgggcggatatggtttctttgatgcagggatgctcctgcatgcgctcaaggggctcaacgtggatcgcgagcggggtggcgacaagacccctcgacgacggttcgttggcaagaagctacggttgaatgaatattga

SEQ ID NO: 27993 - DNA, 2526 bp, Emericella nidulans
tctagaacctctagcgccccctcgcagaagtctttaatatcgcgagcactgaaagctgagcgggatgtcattacggcctcgtcgcaatcgcaggctttggacgctgccattgatgctgcggaacattatatgaaagccctagctttgacaagctcttctaaagacagaaatgtcttggacgcaaagtgcaaagagtggctcacgagagctgaaaagattaaagggtctgaagattggcgttctgtagcacagtctcgacggtctaggcttcgtactccagcgtcgacgcgaaaactcacaactcgtgaggacatcatccttttacagggcgcaaagctgaatggcttcatatttccgccatggaaagcagaacccagtctcactgaattcgagaccggaaccaacggagatgtgttattcaccgataagccggatcttcacctgtctaacttgcagagagacatatttgctggctggaaacggccgcacgagctgctctcggggcaagtggacgatgccgggatgccgctcaaccccgtgatgactgtctccggaaacacggatctagtgcaggacgtgttgacggattgctccgttgttgccagtctttgtgcgacgacctccagatcggagcgtggccttgacgatactctacttccgattgtatatccatgcatccacaattcaatgaaatctgacatttcgccatctggcaagtacatctttcgcttctacttcaacgggtgcttccggaaggtggtcattgacgatcgtttaccgtcgtcaaaaacttcgaggtctttgtacatgattgaccgaaatcatcgtaactttatgtggcctgctctggtagaaaaggcatacttaaaacttcgcgggggttacgagtttcctggaagcaattctgggacagatctatgggtgctgacgggctggatccctgaacaagtctttctccacagtgatgaagtgactgctgaccagatctggtcggatctcttcaaatcgtttcatagcggggatgttctcttgacgatagggactgggaaacttacggagagggagcagaaagagctgggccttgttagtgagcacgactatgccatacttgatatgaaggagctcaaaggacgtcgtcaattcttgattaagaacccctgggctgggactgacgctgtgtaccctgcgcttttcgctgatcctggaccattccccaactcgccttttctctcccccggcacgttctggatggattgcgagatggttcttcaaaattttgagaatttatacctaaactggaatcccggaatattcgcatatcaggaggacatacatttcacgtgggatttgtccaccggtaagggaatggcagggtgctttgtaaagaatccgcagttttcagtttataccgaacgtggcggggtggtttggttattgctaggcaggcatctcaggacaatcgagtctcgtgcctcagaggaagacgagagattcggattcatcagcatatacgtgtttaagggaggaaagagggtagcactcagtgatggagcgctccatcgaggcccttatgtcgactcaccgaacactctcatgaagctcgatgttcccccaagaagtacttataccgccgtcgtgtccgaagagtctttacctcgagtcagtcaaaattttacaatatctgccttctccgattcgcctgtgcgaatatcacatgcccccaacaaatacatatgtgtgactaaggttcaaggttcctggacaccaaccacagccgggggcaatgcagaatcggcacggtactcactgaatccgcagtttagcatagtgctttcggaccccacggacatttcaattgtccttgaaccatcagaccaggagcttgccacacatgtcaagctgttctggtcgggtggaaagcgcatagccagggtccgcagccgcgatatcgtcgcagatagtggtgattatcgccggggtggttccttagtagaaaagcaggacctggaccccggggagtacaccattgttgtctccacatttgctcctgaccaatacggatctttcacactctgggtttcgacaaacattacttgtgaagtgacacagcttccatcagaagctgcagggcggcgagcggtgttgtccgatattggagtcttactccccggccaggataggatgcttgctcccctaacaactccccgactgacgcgagtcaagctcattgcgaggagccgagagtccagaatcggtaatagacctgttggtccctcgcccttattgatgaccgttgagcttggtcaggggccgtacaaggagattctagccacatcagaggatggtgaccatagcgactcgatatctggagtccgagtggaagacttcgatcttcagcctggcctggaagagaggggcggggtgtggattgtgcttgagagaattggaggtctggcggtcaagtggaagatcatttcgaagtggaagctctgggagaagagagagtggagattggggaatggatag

SEQ ID NO: 27994 - DNA, 2883 bp, Emericella nidulans
gcccctaaactgtttaccttcgtttcagccctctcagggcttgcttcccttgcctctgcttttcacgcagaagccaaatccaacattgccgtctactacggccaaggtgtcaaccaacctcgtcttgccgagttctgcgcggagacgtcctacgacattatcaacatcggattcatcaatagcttccctgaacagaaccctctgactgggctgcctggtagcgattttggcaatcaatgttgggctgatacctttgtggtcgatggcatcgcttcacagctgtactcacactgccccaacatcgcggaagatatccctaaatgtcaggcagctggcaagaaagtgttcctgtccctgggcggtgcaactcccacgtactggttcgacactatcgatgcctcgaccaagttggccgactttctctggggtgccttcgggccagtcaccgacgcctggactgtcgccgacaagcctcgcccttttggcaatgctgtggttgacggtttcgactttgacatcgaattctttggtagcaagggctacgccaacatgatcaagcgtttccgcaggcgcttcggggaggttcctgatcagaccttttacatctccgccgcgccccagtgctccatccctgatgagcagcttagtgttgccatcaagaacgccgtcatcgattttgtctgggtccaattctataacacacctggctgctctgctcgcgactttgtcctgggcactaagaacggtttcaattacgacagctgggtcgaggttatcaaggcgggtgccaaccccaacgcgaagctctacgttggtctgcccgctagtggggcggctgcgaaccttggctattatttgaccccggaagaggtcaagcctctggtgaagaagtacatggacaagtatccggagacatttggaggtgttatgttgtgggaggccacgcaggcgcggaataatcagattgatggtgtcggttataatgagaagatcagggagatcctgtatgaccttgaccccaaccatccccctccaaccacctcccctacgccgactcctactccaagtaccactacaacttctactacgtccaccacgtccactacatctgcaacctctaccacgtctaccacgtctacaacctctactacgtctactacgcctaccacgtctactacgtccaccacgtctaccactactcctactccctctccatcaccttccactgcttcgtcttccaccaccgagaccgtgactcccagtcccaagccgtctccatcggagagcagtactacatctgagacctcttccctccccagcacgtcgacgcctgtagtgtctgagactccctcagaaaccaagactcctacctcatcgagcgcaccgcccctttcttcaagcagccctgttggtggaagcagctccacagcctcttcaagcacttccactccttcggagactccttctgcatcgagcacccgtgctgtctccgagacaagcactcacatctctacaagtacatcatctggccctgaaactagcctcaccggctcaagcacatctgtgcctgccaccagctcttctgttccctcgagcgcgatcagcccgtcaagcaccccagtcatctcagagactcctaggcctccggtaacttcttcgagctccagcacattcgtgtcctcgactagcactagcacggactgctctgaaagttccactgcaatcggtactcactcgtcttccagcatctcggagaccccctcagccagcacacctgctgcctctccttcgacctcgcctgagacaaccaagaccctgacggttttccctacgccgggctcctccgtgtctaccggaaccacctccgcgtccactttgtccagctctgttcccgcaactagcggtggccacacggaaacctcaaccgtgtcaacctccagtgccaaccagacacccagcgcctcgaccagcaagcctttgattccgacaaattctgcgtcaagcactagcactggctccgtgacctccacgccaagcgctccgggggtaccaagcagcagcgctgggtccgatgagaccgccacgacaagcacgactgactctgagcccaccagcactagctctggatccgttactgccaagcccaccactacggagcctgccacgactacgacaatcatcgtgacctcgtacaccagcatctgcccgacaggtttcaccaccatcaccaccactattacgtcaacatactgccctggtacggcctctgccaccgctacagctattgcccccacgaccgacgttcctggctctggttccggttccagcccggcacagcccaccatcaccgccgatattccagaaggctggacgacaactgttacagtctgtaccgtttgtgccgccaccccgacaacggtaacgttaaccctcccacccgcaaccaccacggaagagtctacttccgcgcagcccactggcgaggtcccgtccagtgacggcagcggctcgggtgaggtttcaaccaccacggtcgtcgtcgtccctgcacccactggtaatgctggtgacggggtcccggctcctggtgcaaatgtaggtgaagaatacacagctgctcctggttcagcgaccaccagcaagccccttattggcggcggtgccagcggtgcccacaccgcgtacccctacgcttcctcaacattccacatcattccgtcggcatcagctcacgtccccgttccttcgggctcgggctcgtcacctagcggtacccagggtggtgcctctcccacattcactggtgcgggatctcgctatgatgtggtcaagggtgttcctgcccttgtggctctcgcgctctccctgcttgctgttttgtaa

SEQ ID NO: 27995 - DNA, 2940 bp, Emericella nidulans
ttggtggatgcacccgagaatgacctgcagttacgatgtcatatccgagcgcagttcatatcttgtggcatcaaacgacttttgtcgaagatggaaggctttcagtatgaagttattgataaacagattgagcattttcgagagaatgaggccattgattacgaagatttactgcaacgcgagagtagcagtacgaaggatagtattgagggggaggttaaggacatgaccgaccctcttcagatcactgacgccatcgcgagtcgcctcaatggaacgagagcccacgattacttcctttcagctctgcagcatctgcttctcatccgggagaattctggggaggatggtctcagaatgtaccagctcgtggacgctatgctaagctatgtggctatggataggaggctaccggatcttgacctgcggcagggattgacattcactgtacagagcttgttagatcgactacatacggatgcagaagcgagacgagcgtacgacgaatctctggaagcgcgccaaatcgcagaagccgcacttgctgaacgagatgagatgaaggcgcaggttgagttaggcgcggatggcctggtgagaaagttacagaagcagattgaggagcagaccggtataattgagctacagagcaggcagaatgagatgctcaaggccgagcttgccgatgttcagaggcttcgtgctcaagagttgcagcggaatgagctggagacgcgagaactctaccttatgcttcgcgacgctcaagatattgcggcatcaaatgcgaaaaagtcgaacatgggagaggccgagacggatcccgctcatatgcgagggatcctagatagagagaagctgttgacacggctagagaagcagcttgaaaggacaaagacgcaattcaagttggaaggtaaagtttggggccagcatgacccatcggaccgactgcgtgagctccgtgagcaaatggacggcgatgctgggcccagagaagccttcgaagagcaagcccgcctgaacctcagcctgaacccagtaggatcggtttaccgcaagaaaacctacatccagggcatggaggatactgccaccgaggagctaggccaaactgatgatgaagtcgtctacgctaaggcccgacttgtggatcttcatcggccgcgtatggacccggaacaagcaactggccttcttggtgagattgctgccaaggttccaaagatcgatgcggatgatgcgaaggatgagggcaaaccaactgaatctgaacagccagcagaaggtgcagccaccaaaggcgatgaacaaggagtggacgataccgtcgctgtggacaaagccactgcggctcctccgccgccgcctccccctcctcccgcacatccaggattatctggagcagctccgccacccccaccgccgccgcctccaccacccccaggcgcaggagcagcaccaccacctcctccgccgccaccaccaccccctccgggtggacttggcggcccccctcccctcccctccccctcctccaccgggtggttttggtggacccccgccgcctccccctccacctggtggttttggcggtccacctccgccgccgccgcctcctactggtggtgcatttgcgtgccgcctccacctcctccaccaggcacggttatcggtggatggagagcaaattacttggcttcccaaggtgccccgtctcacgctatacctgtgatgtcctctatcagacctaagaaaaaactcaaggcccttcattgggacaaggtcgacaccccgcaagttacagtatgggcaactcacggcacaactccccaggagaaggaggagaagtacgttgagctggccaagaggggagtcttggatgaagtggagcggctattcatggccaaggagaccagaatcttcggaggtggtgtggcagcaaagcaacgaaaggacaagaaacaaatcatctccaacgacttatccaaaaactttcagattgccttgtccaaattttctcagtttccggctgaagaggttgtccgaaggatcatacattgcgacgccgagattctggacaacatggttgtcatggaattcttgcagcgagatgaaatgtgcacagtaccggaaaacgtatcaaaactcatggcgccatacagcaaagattggactggccctgatgctgccaataccgaacgagaacaagaccctagtgagcttactcgtgaagatcagatttacctctatactgcctttgagttgaatcactactggaaggcaagaatgcgtgcgcttgcgctgactcggtcttttgagccagactatgagcatatttctgctaagctcagggaggttgtgcgggtgagcgaatctctgagagattctgtttccctgatgaacgtgcttggtttaatcctagacatcggtaactttatgaacgacgccaataagcaagcgcagggtttcaagctaagctctttggctcgtcttggaatggtcaaggacgacaagaatgagacaacgtttgcagatcttgttgaacgtatcgttcggaaccagtatcctgaatgggaagactttaccgaacagatcagcggagttattggcctccagaaactcaatgtcgaccagctgcggactgatgcaaagaagtatatcgataacatcaagaatgtgcaggcgagcttggatgcgggcaatctcagcgacccgaaaaagttccatccacaagtccgtgtcagccagattactcaacgcagtatgaaagatgctaggcgaaaagcggagcagatgcagctttaccttgaagagatgctcaagacctatgacgatattatggttttctacggcgaagacaataccgatgatggtgctcggcgggatttctttgcgaagttggctgcgttcttacaggagtggaaggtatgctactaa

SEQ ID NO: 27996 - DNA, 2970 bp, Emericella nidulans
gcggagcggaagatttcctatgctgccgacgtcgagaatggtgaccattctcgtcctactgatgtgaacgatagcgctggccttgacgaatatggcgctctcaaccgctacatttcgaccgctcgcgacaaccgtcgtggatcgacctctagtgctggtgctcttagcatgaagcagaagaagaagccctggtacaagttctgggccaaggctggtggtgagaatggcgaggagggcttcgttgctcctgaagactggctcgagaccgatctcaacggtcttccttccagccagatcgagcctcgccgcaagcgtggtggctggaacgagttgaccaccgagaagaccaacttcttcgtccagtttattggttacttccgtggtcccattctttatgttatggaattggctgttctccttgctgctggtcttcgtgactggattgatctcggtgttattatcggtattcttatgctcaacgctgtcgtcggttggtaccaggaaaagcaggctgccgacgttgtcgctagtttgaagggtgacattgctatgaaggctgttgtcaagcgtgatggtcaggagcaggagatccttgctcgtgaacttgttactggtgatatcgtcgtcattgaggaaggtactatcgtgcccgccgatgttcgcctcatctgcgactacgacaagcccgagacctacgagacctacaaggaatacctcgccactgccaacgatgacacccttaaggagaacgatgatgatgacgacgaccatggcattgaggcccgccttggtgtttcactcgttgccgtcgaccagtccgccatcactggtgaatctctcgctgtcgacaagtacatggctgacacctgctactacaccactggttgcaagcgtggaaaggcctacgccatcgttactgctacggctaagcactcgtttgttggtaagaccgctgctctcgttcagggcgctcaggaccagggtcacttcaaggctgtcatggacaacatcggtacctccctgcttgttctggttatgttctggatcctcgccgcctggattggtggtttctaccgtcacctgaagatcgccactcctgagcactctgacaacactctccttcactggactttgattcttcttatcatcggtgtccccgtcggtcttcccgttgtcacaaccaccaccctcgctgtcggtgctgcttatcttgcggagcagaaggccattgtccagaagctcactgctattgagtctcttgctggtgtcgacattctctgctctgataagaccggtacccttaccgctaaccagctctctattcgtgagccctacgtcaatgaaggtgtggatgtgaactggatgatggctgttgctgctattgcttccaaccacaacgttaagaacctcgaccccatcgacaaagttacgatccttactcttcgccgctaccccaaggcgcgtgaaatccttgctcggaactgggttaccgagaagtacactcctttcgatcctgtctctaagcgtattactaccatctgtacctgcgacggtgtccgctacacctgtgctaagggtgctcccaaggctatccttgccatgtctgagtgctccccggaggaggctcagaagttccgtgagaaggcttccgaattcgctcgccgtggtttccgttctcttggtgtcgccgtccagaaggagggtgagccctggcaattgctcggcatgtaccccatgtttgaccctcctcgtgaggacactgcccacaccattgctgaagctcagcatctcggtctttccgtcaagatgttgactggtgatgctcttgccattgccaaggaaacttgcaagatgcttgctcttagcaccaaggtttacgactctgagcgtcttatccacggtggtcttgctggttctgcccagcatgacctcgttgagaaggctgatggtttcgccgaagttttccccgagcacaagtaccaggtcgtcgagatgcttcagcagcgtggtcacttgactgccatgactggtgacggtgttaacgatgctccttcccttaagaaggctgactgtggaattgctgtcgagggttccactgaagccgctcaggccgctgccgacattgtcttcctcgcccccggtcttagcaccattgttgatgctatcaagcttgctcgtcagatcttccagcgtatgaaggcgtacatccagtaccgtatcgctttgtgtatccaccttgagctttacctcgtcacctccatgatcatcatcaacgaaaccatcaaggccgaccttattgtcttcattgccctgtttgctgatttggctaccatcgccgtcgcttacgacaatgctcactttgaggctcgtcccgtcgagtggcagttgcccaagatctgggttatctccgtcgttcttggtgttctccttgctgctggtacctggatcatgcgtgcttctctcttccttgagaacggtggtatcatccagaactttggttctcctcagcctatgctcttcttggaagtctctcttactgagaactggctcatcttcgtcacccgtggtggtaagacctggccctcgtggcagctggttggtgccatcttcgttgtcgatgtcctcgccaccctcttctgtgtcttcggctggctcgccggcgactacgttgagaccagcccccccagccaggccactttctccaccaacaacgacaccgacattgtcaccgttgttgttatctgggcttactcgattggtgtcacaatcatcattgctgtggtctactacctcctcaccatcatccctgcccttgacaacctcggccgcaagaaccgctctgtcgttgacaccaaggtcgagaacctgcttaaccacctctctaagctggctatcgaacacgaagttgatgctaatggcaagtcacgatacacccttggcgctcgtgctgagcctgaggacgatgagtaa

SEQ ID NO: 27997 - DNA, 2970 bp, Emericella nidulans
gcggagcggaagatttcctatgctgccgacgtcgagaatggtgaccattctcgtcctactgatgtgaacgatgacgctggccttgacgaatatggccctctcaaccgctacatttcgaccgctcgcgacaaccgttgtggatcgacctctagtgctggtgctcttagcatgaagcagaagaagaagccctggtacaagttctgggccaaggctggtggtgagaatggcgaggagggcttcgttgctcctgaagactggctcgagaccgatctcaacggtcttccttccagccagatcgagcctcgccgcaagcgtggtggctggaacgagttgaccaccgagaagaccaacttcttcgtccagtttattggttacttccgtggtcccattctttatgttatggaattggctgttctccttgctgctggtcttcgtgactggattgatctcggtgttattatcggtattcttatgctcaacgctgtcgtcggttggtaccaggaaaagcaggctggcaacgttgtcgctagtttgaagggtgacattgctatgaaggctgttgtcaagcgtgatggtcaggagcaggagatccttgctcgtgaacttgttactggtgatatcgtcgtcattgaggaaggtactatcgtgcccgccgatgttcgcctcatctgcgactacgacaagcccgagacctacgagacctacaaggaatacctcgccactgccaacgatgacacccttaaggagaacgatgatgatgacgacgaccatggcattgaggcccgccttggtgtttcactcgttgccgtcgaccagtccgccatcactggtgaatctctcgctgtcgacaagtacatggctgacacctgctactacaccactggttgcaagcgtggaaaggcctacgccatcgttactgctacggctaagcactcgtttgttggtaagaccgctgctctcgttcagggcgctcaggaccagggtcacttcaaggctgtcatggacaacatcggtacctccctgcttgttctggttatgttctggatcctcgccgcctggattggtggtttctaccgtcacctgaagatcgccactcctgagcactctgacaacactctccttcactggactttgattcttcttatcatcggtgtccccgtcggtcttcccgttgtcacaaccaccaccctcgctgtcggtgctgcttatcttgcggagcagaaggccattgtccagaagctcactgctattgagtctcttgctggtgtcgacattctctgctctgataagaccggtacccttaccgctaaccagctctctattcgtgagccctacgtcaatgaaggtgtggatgtgaactggatgatggctgttgctgctattgcttccaaccacaacgttaagaacctcgaccccatcgacaaagttacgatccttactcttcgccgctaccccaaggcgcgtgaaatccttgctcggaactgggttaccgagaagtacactcctttcgatcctgtctctaagcgtattactaccatctgtacctgcgacggtgtccgctacacctgtgctaagggtgctcccaaggctatccttgccatgtctgagtgctccccggaggaggctcagaagttccgtgagaaggcttccgaattcgctcgccgtggtttccgttctcttggtgtcgccgtccagaaggagggtgagccctggcaattgctcggcatgtaccccatgtttgaccctcctcgtgaggacactgcccacaccattgctgaagctcagcatctcggtctttccgtcaagatgttgactggtgatgctcttgccattgccaaggaaacttgcaagatgcttgctcttagcaccaaggtttacgactctgagcgtcttatccacggtggtcttgctggttctgcccagcatgacctcgttgagaaggctgatggtttcgccgaagttttccccgagcacaagtaccaggtcgtcgagatgcttcagcagtgtggtcacttgactgccatgactggtgacggtgttaacgatgctccttcccttaagaaggctgactgtggtattgctgtcgagggttccactgaagccgctcaggccgctgccgacattgtcttcctcgcccccggtcttagcaccattgttgatgctatcaagcttgctcgtcagatcttccagcgtatgaaggcgtacatccagtaccgtatcgctttgtgtatccaccttgagctttacctcgtcacctccatgatcatcatcaacgaaaccatcaaggccgaccttattgtcttcattgccctgtttgctgatttggctaccatcgccgtcgcttacgacaatgctcactttgaggctcgtcccgtcgagtggcagttgcccaagatctgggttatctccgtcgttcttggtgttctccttgctgctggtacctggatcatgcgtgcttctctcttccttgagaacggtggtatcatccagaactttggttctcctcagcctatgctcttcttggaagtctctcttactgagaactggctcatcttcgtcacccgtggtggtaagacctggccctcgtggcagctggttggtgccatcttcgttgtcgatgtcctcgccaccctcttctgtgtcttcggctggctcgccggcgactacgttgagaccagcccccccagccaggccactttctccaccaacaacgacaccgacattgtcaccgttgttgttatctgggcttactcgattggtgtcacaatcatcattgctgtggtctactacctcctcaccatcatccctgcccttgacaacctcggccgcaagaaccgctctgtcgttgacaccaaggtcgagaacctgcttaaccacctctctaagctggctatcgaacacgaagttgatgctaatggcaagtcacgatacacccttggcgctcgtgctgagcctgaggacgatgagtaa

SEQ ID NO: 27998 - DNA, 237 bp, Emericella nidulans
tctgactttgctcgcaaggatttctccacaaaggctaaggaggagatcactcccgacgccagcaagtccacccaggaaagggtgaaggagaccgtcaccgataccaccgaccgcatctcccgcggcgtccagcccgatgaccagaaaagcaccacccagcaggcctttgacaagagccagcgtgtgagcgacagggagggccacggcagtacccctagtctattggcgataaggtaa

SEQ ID NO: 27999 - DNA, 264 bp, Emericella nidulans
catcggacgcagagcttggattacggtattgtcctggagggagagattgagatgcacttggattctggggagaagagattgctcaagaaaggggatattgcagtgcagagagggacaatgcatgcttggtataatccgagtgagacgcagtggacgaggatggtttttgttttgcaggagtgtaagccgcttgttgttgcggggcaggagctcggtgaggatttgacccaggcgaaaacagatgatattaagccgagtcgttag

SEQ ID NO: 28000 - DNA, 282 bp, Emericella nidulans
gcttccgagaagaaggacaagctcgaaccccaaatcaagtccgtcgacatgtcggaggacatgcagcaggaggctgtcgaagttgctatcgaggctatggagaagtatcatattgagaaggacattgctcaatacatcaagagagaatttgactctcgcaaaggcgctacatggcactgtgtggtgggaaggaactttggaagctttgtgacgcacgaaacgaagcacttcatttacttctacctcggccactgcgctatccttttattcaagacacaataa

SEQ ID NO: 28001 - DNA, 309 bp, Emericella nidulans
tctggacgtggaaaaggtggcaagggtctcggcaaaggtggcgccaagcgtcaccgcaagatcctacgtgacaacatccagggtatcaccaagcccgctatccgtcgtcttgcgcgccgtggtggtgtcaagcgtatctctgccatgatctacgaagagacccgtggtgttctaaagtcttttctcgaatccgttatccgtgacgccgtcacctacaccgaacacgctaagcgcaagaccgtcacctcgctagacgtggtctacgcccttaagcgccagggccgcaccctctacggtttcggtggctag

SEQ ID NO: 28002 - DNA, 309 bp, Emericella nidulans
tctggacgcggaaagggtggcaagggtctcggaaaaggtggcgccaagcgtcaccgtaagatcttacgtgacaacatccagggtatcaccaagcccgctatccgccgtctcgctcgccgtggtggtgtcaagcgtatctctgccatgatctacgaggagacccgtggtgtcctcaagaccttcctcgagggtgtcatccgtgacgccgtcacctacactgagcacgccaagcgcaagaccgtcacatctctcgacgttgtctacgctctcaagcgtcaaggccgcaccctctacggtttcggtggttaa

SEQ ID NO: 28003 - DNA, 309 bp, Emericella nidulans
tctggacgcggaaaaggtggcaagggtctcggcaaaggtggcgccaagcgtcaccgcaagatcctacgtgacaacatccagggtatcaccaagcccgctatccgtcgtcttgcgcgccgtggtggtgtcaagcgtatctctgccatgatctacgaagagacccgtggtgttctaaagtcttttctcgaatccgttatccgtgacgccgtcacctacaccgaacacgctaagcgcaagaccgtcacctcgctagacgtggtctacgcccttaagcgccagggccgcaccctctacggtttcggtggctag

SEQ ID NO: 28004 - DNA, 339 bp, Emericella nidulans
gctaagggcggtgacagctactctcctggcgactctaccaagggtgctaagctcttcgagacccgttgcaagcagtgccacactgtcgagaacggcggcggccacaaggtcggccccaacctccacggtctcttcggccgtaagactggtcaggctggaggctacgcctacaccgatgccaacaagcaggccgacgtcacctgggacgagaactctctgttcaagtacctcgagaaccccaagaagtacatccctggtaccaagatggctttcggtggtctcaagaagaccaaggagaggaacgatctcatcacctacctcaaggagagcactgcttaa

SEQ ID NO: 28005 - DNA, 396 bp, Emericella nidulans
actggcggcaaatctggtggcaaggctagcggcagcaagaacgctcagtctcgttcttcgaaggccggcttggctttcccggtcggtcgtgttcaccgtcttcttcgcaagggaaactacgcccagcgtgttggtgccggtgcgcctgtctacctggctgccgtcttggagtatcttgctgctgaaattctcgagcttgctggaaacgccgctcgtgacaacaagaaaacccgtatcatcccccgccaccttcagctcgccatccgaaacgatgaggaactgaacaagctcctgggccacgtcactattgcccagggtggtgtcctccccaacattcatcagaacctcctccccaagaagacccccaaggccggaaagggcagccaggagctgtaa

SEQ ID NO: 28006 - DNA, 420 bp, Emericella nidulans
gctcgcactaagcagactgcccgtaagtcctcaaagtctactggtggcaaggctccccgtaagcagctcgcgtccaaggctgcccgtaaggccgctccctccactggaggtgtcaagaagcctcaccgctacaagcctggtggtaccgtcgctctccgtgagatccgtcgctaccagaagtccactgagcttctgatccgaaagctccccttccagcgtctggtccgtgaaatcgcccaggacttcaagtccgacctccgcttccagtcctccgccatcggtgctctccaggagtccgttgaggcctacctcgtctccctcttcgaagacaccaacctgtgcgctatccacgccaagcgtgtcaccatccagtccaaggacatccagcttgctcgtcgcctccgtggtgagcgatcttaa

SEQ ID NO: 28007 - DNA, 444 bp, Emericella nidulans
ggtggtgtcaccgttcgcgatgtggacgcgcaaaagttcattgtggcttacgccgctttcttgaagcgtcagggaaagctccccatccctggttgggttgacactgtcaagacctccgcctccaacgagcttcctccccaggacgccgactggtactacgtccgtgctgccgctgttgcccgtcacatctacctccgcaagaccgtcggtgttggccgtctccgcaaggttcacggctctaccaagaaccgtggctcccgccccgcccaccacgtcgatgcctccggtgccgttgaccgcaaggtcctccagtcccttgagaagattggtgtcctcgagcaggacgaggagaagggtggccgccgcatcacacagtccggacagcgtgatcttgaccgtatcgccaagaccaccgttgacgaggaggaggaggatgacgagtaa

SEQ ID NO: 28008 - DNA, 528 bp, Emericella nidulans
gtaaacaccggtcttccagcagggtgggaagttcgccattcgaactccaaaaaccttccctactacttcaaccccgctaccagagagtcacgatgggaacctccagcggataccgatatggagactcttaagatgtacatggcaacatatcacagcggcgccgctacttaccatgaagccccgagtcaagaaggcaagatccgttgcagtcacctcctagtcaagcacagagacagcaggcgaccgagcagctggagggaggccgagattactcgaacaaaagaggaggcgcgcgagattttgcgcggtcatcaggagcgaatcatgcgaggggagatccggctcggagatcttgcgatgtccgagtcggactgcagtagtgctaggaagaagggcgatctcggcttctttggccgtggtgaaatgcagaaagagttcgaggaggcagcgttcgcattgcaaccgggtcaagtcagtgacattgtcgaatcagggtctggtcttcatctcatcgagcggctacaatag

SEQ ID NO: 28009 - DNA, 546 bp, Emericella nidulans
aacctcacttctaccgccgctctcgcctctctggccgtcgctgctaccgctgctccctccacgcccgaaacctttggccttgttgccatccgctctggtgatgctgtccagtacgctggcttcaacgctgctctcggcagcatcttcgccggcctccccaagcagaacgccacctgtgagggcactgacagcggtttcgcgacgttctacatcaaggatggagccctctatctctacggttccgaggagacccaggaaatttatgtcgaccgttccggcatgggccagggcttgatcggatacaccaccggtgacaatgccagtggccctcgcaacagcgagcggaccggctggtccattgacgaaaacaaccacctcgtgtttgacggcaacagcctcattgcttgtcccaacagcattgatagtgcctacagcatctgggcctctgctggtgtcgccaacccgggcggcaacaaggactgcgtcggaatcgctgcccgtgttgagaagaccgagaaccctattgcttgcacttactcctcttaa

SEQ ID NO: 28010 - DNA, 564 bp, Emericella nidulans
atcggcttcactcggactctgcatggcgtgatgcagaatatcacccacctttgctcgcgatccaagtcccgtacctggggtaaggatggttggaagaagattgtggtctgcatcatcgccgacggtcgtaagaaggtgcacccgcggaccctcaatgctttggcggctttgggtgtctaccaggaaggtatcgccaagaacgttgtcaaccagaagcaggtcaacgcgcacgtctacgaatacacgacgcaggtatcgctcgatcccgacttgaagttcaagggcgctgagaagggcatcatgccgtgccaggtgctcttctgtttgaaagaacacaacaagaagaaattgaactcacaccgttggttcttcaacgcttttggccgagcactacagccgaacatttgcatcctgctcgatgtgggtaccaaacctgcgcctaccgcactctaccacctctggaaagcgttcgaccagaactcgaacgtcgcgggagcggctggtgaaatcaaggcgggcaaaggcaagggtatgctcggtcttctgaaccctctggttgccagt

SEQ ID NO: 28011 - DNA, 645 bp, Emericella nidulans
ccgttcggcactctgtacactcgcccgttcaacccgcggtcgctggcgattcttgcgattgcaaaagcgaacaatttgcctctgaaaatcaagaccatcacttcattcaaagatgctaccgaagagtatctccagctcaaccctctaggcaagattcctacgtttgtgggggccgacggctacgtattgacggaatctattgctattgctctctatgattcaaatacgactttacttgggactaccggacaagaatatgcctccatcattcgctggatggccttcgggatcaccgaaatcctcccagcgttagggggctggttcaacccgctcatcggacgagccaacttcaatgctgacaacatatatcaaagcaaagatgacactttagcacggctaaagattcttgacaaccatctttgtgggcgagagtacttggtcggggaaaccctcagcctagctgatctgtttgtgctcgggattgtgcagggcgcattccggtttttccttgataaacgctggagggatgagcaccgcaacctatctacctggtttgagcgtgtgcatgctttgcctattgttgttgatgttgctgggcctccggtgctggcagagtatgaaatgccgattcagccgcctaagtga

SEQ ID NO: 28012 - DNA, 645 bp, Emericella nidulans
ccgttcggcactctgtacactcgcccgttcaacccgcggtcgctggcgattcttgcgattgcaaaagcgaacaatttgcctctgaaaatcaagaccatcacttcattcaaagatgctaccgaagagtatctccagctcaaccctctaggcaagattcctacgtttgtgggggccgacgcgtacgtattgacggaatctattgctattgctctctatgattcaaatacgactttacttgggactaccggacaagaatatgcctccatcattcgctggatggccttcgggatcaccgaaatcctcccagcgttagggggctggttcaacccgctcatcggacgagccaacttcaatgctgacaacatatatcaaagcaaagatgacactttagcacggctaaagattcttgacaaccatctttgtgggcgagagtacttggtcggggaaaccctcagcctagctgatctgtttgtgctcgggattgtgcagggcgcattccggtttttccttgataaacgctggagggatgagcaccgcaacctatctacctggtttgagcgtgtgcatgctttgcctattgttgttgatgttgctgggcctccggtgctggcagagtatgaaatgccgattcagccgcctaagtga

SEQ ID NO: 28013 - DNA, 681 bp, Emericella nidulans
tttgactacgacggcacccttaccccgatcgtgaaggacccccagtccgctattccgtcagaccgtgttttgcgaactcttaagactttggctgcagatcctcggaatgcggtctggatcattagtggtcgcgaccaggccttcttagacgagtggatgggccatatccctgagcttggactgagcgcagagcatggttgtttcatccgaatgccacggtccgacaactggcaaaacttagcggagacaaccgacatgggctggcagaaagaagttatggagatatatcaacactttactgagcgcacgcaaggatctttcatcgagagaaagaaagtcgctctaacgtggcactaccgacgggccgacccggaatatggtgcattccaggcgcgagaatgtcggaagcagctggaagagcatgtatccaaaacctgggatgtggaagtcatggccggcaaagccaatctcgaggttcggccaaggttcgttaacaaaggctttattgcgacgcggcttgtgcaggcatacgaggacgggaaagtccctgaatttatcctgtgttccggagacgactttacagatgaaggtatgctctttccttttcttgccacccctaagcttcgccatgaattgctgctaacatatcttagatatgttccgtgccttgaagaaatttga

SEQ ID NO: 28014 - DNA, 789 bp, Emericella nidulans
ctgtccgccgcccgcagatttatcaacagcaacacagacgccgtagccgaatatcccgaccccatccatgtcttcatccagttccttcacaaggttccacctggccaggtttccgtctcatgcaagatactccgcgccacagcccgactgtgtgtcgtcaaggtcgacttggagttgtctcgacagccagagccggggtatggcgaggcgcaacaatcccctgcatgcattgcgattgctactttcgccaatttggataatgaaaagggcctgacacaagactctacacaatcggagcagttaggtgcacatccactcccgtctcgagagacagattgcgtcacaatcgacgaccccgtggtagatgcaactcctgttactcgaaagctacactgggttgctcctcgttctgcggacggtctatggggtcaccggctaggcgggcaccagcgcgaagtctggctgtcatttcgagacgaaacgccaatttcagatcttcttcatctggcgctgcttgcggacatgcctctccaaccgcctgcaactcacacagcgggcttctattcgcgctatgccctctccaccctctgtctttcggtggagttcaaaaaacggcccggcccgagcacgaaatgggttttgttacgatcgaattcgcacaaggttgtggacgggcggtatgatgtgaatgtccaaattctaaacgaggaaggagagatccttgcgctgagcaatcatgtggtgtatatctcagatttgaggaagaactcgaagagagcgaaaatgtga

SEQ ID NO: 28015 - DNA, 804 bp, Emericella nidulans
gactcgctcactactcatcctgccactgcccaacaggctcgtgccttcacttctccctcgtcgctgtctttccctggcggcactgccttccctggtggtgctgacctgacaccgccttccgataaggatgcgaatatggccactaatggtcagagcgcgaatggaaatgtgaatggccagcagcagggagcaaatgccgctaacggcaatggggtgatgcccgctactccagctgcgacccctggtgccagcgctccagggagtggtatcgtgcctaccttgcaaaacattgtcgctacagtcaaccttgattgtcgtcttgatctcaagactattgcgctgcacgccagaaatgcggaatacaaccctaagcgtttcgcggccgttatcatgcgtattcgggaacccaagacgactgcgttgatcttcgcctctggcaagatggtggttactggtgccaagtcggaagacgattccaagttggcttcgaggaagtacgctcgtatcatccagaagttgggcttcaatgccaagttcacagatttcaaaatccagaacattgtggggtcctgcgatatcaaatttccaattcgtttggaaggtctggcgagtcgtcaccacaacttcagttcctacgaaccggagctgttcccaggtcttatttaccgtatgatgaagccaaagatcgtcctcttgatcttcgtcagcggaaaaattgtcctgaccggagccaaagtccgtgaagagatctatcaggctttcgaactcatctaccctgtgctctctgatttccgcaaggtctaa

SEQ ID NO: 28016 - DNA, 810 bp, Emericella nidulans
gcgactaacgccagatacgagccggctcctcagcgagattcgttcgaggaccagcactacacgcaggccccgccttcttatcaggctactgcgcaagagcctacgcctcgcagcgaggacgacaacgttcctgatgactttaaatttggtggcaccgtcgcggagggcactctgcccatccgtatgcagttcatccgcaaggtctatgcgatcctcaccgtccagctgctcctaaccaccgtcatgagctccatctcattcttcagccccagttactgcgaatggatccgtagcaacgtctggctcatgatggtatccgtctttggcgctttcggattcctactcgtaacatactggaagcgcaaaagctaccccgcaaacctcctgttcctctccgcgttcaccatccttgaggcctactccatcagtgtggttacatcatattaccagcctcggatcgtggtgcaggctttgatcttgactttgggcttgtttgttggtctcacactctttgcatgccagacaaagtatgacttcaccaactggatgccatacctgttcggtgcactgtggttcctcatcctctttggatttgtggctgcctttgttcctcacggcagcaccatggaacttatctacggcagtctggcggccctgattttctcaggctacattctggttgacacccagcttatcatgcgccactaccatgttgaggaggagattgcggcttcgatttcgctctaccttgatatcctcaatctgttcttggccatcctacggattttgaataaccagaataacaactga

SEQ ID NO: 28017 - DNA, 822 bp, Emericella nidulans
ccttcctatgcggttctgggggctacgggtaatactggacgggcgatcgtccaggtactacttgatcgagcagacaccgacaccagaattcacatctgcgcctactgtcgctccaaggaaaagctcttccgtgtctgtccggcggccgagacttcgaaaagcctttcagtctttcaaggacggctggatgatgatagcctcatcgatgaatgtctcaggggcaccgatgccgtgtttctggtagtcgccattgtcgacaacatgcctggctgtacggtggccatgcagactgccgaggcggttgtagcgtctttgcaacggcttcgcgctacagaccctgcaatacgtcttccgcgactagtgattctttcgtcggcctccctggagcccacgttctgcaacgatgttcccgccccggtgcactgggtcctcaaaactgccgtctcccatctttaccgcgacctcgccgctgccgaagcatacctccgcgcccaatccgactggctctcggcgacctttgtcaagcccggggggcttgtacacgaccaggcccgcggtcacaaggtctgtctcgaccgggctcaaaccccgctctcatttctcgacttggctgcgggcatggtcgaggtggccgacgcggatgatggccgataccatatgcgcagtgtgagtgtggtgccggcgtcaagggttgcaatatttccatgggacggcgtttactatacgtttacgggcttgctgtttcatttttgcccgtggacttaccggtttcttggtgaatataagttgcagtcgagaaaggagagggacaagcaagcttag

SEQ ID NO: 28018 - DNA, 858 bp, Emericella nidulans
cagggatggaagacgatagtcggcaagctgatgagccgctacgactttcctcttccagacctgagcgttcaggcagaggacaagatcctcggcggcgtccccacacgcatctacacgccgccggatgtagctgacccaccgctggccctctacttccacgccggcggatgggtcatgggcagcattgacgaggaggacggcttcgtccgcactctctgtaaactggcccgcacgagaatcttcagcgtgggataccgtctagcccccgaattccgattcccgatggcgcttgacgattgtctaactgttgcgagatcggtcctggaaacgtatcccgtgcaatcaatctgtttcatcggtgcctcggccggtggaaacatggcgttcagtacggcacttaccctggttagtgacggcctaggagaccgagtccaaggcgtggttgctctcgcgccggtaaccgttcatcctgactccgtgtccgcagacaatcgagaccgaggagagtatacatcctatgaagagaatgaccggttgacaatcaacaccggctccgcgatgcggtcgttcttcgattgctatggcgcaccaccggatgatccccggctttcatgtcttctgcatccgggtcttggaaaactgaataaagtctacatggccgttggcgacgccgacaccctgagggacgacgtccgcctgatgagggacgctctagtcgcgttggaagtcccggtaaagtgcgatgagtatcctggctatccgcatttctcgtggctatttccgtcaccagcactgagggaacatcaggcactcttcttcggaaatctgttaagtggaatatgctgggtttgtgagtaa

SEQ ID NO: 28019 - DNA, 891 bp, Emericella nidulans
ccttcgtacgcccttctaggagccaccggcgctactggatccagtgtacttcgccatctgctttactcaggctcgtccagtgacctcacagtgaatgtcctggttcgctccaagtccaaactgctggctgcctttcccagcctcgacaagcctcgaccatccgtgacgtcgtccatcccgacgatccgcattttcgaaggagactctaccaatcccgatgtactttgcgcggttctccaagacgctagcctcgtgttcatgtgcgtcgcgcagaacggcagtccaatggggacaaccctagtgcagaacacggccgccgcgctgattgaggcccgacgccgacaggcacagccacgcggtgagctaacggtcatccagcttcggtcggcgtcattgaaccccgtgcttgcggttcaagtgccgcgatttgtgcatcgcgttgtttgcttttgcttggctgctggctatgcggatctccgacgagcatgtgtcctctatgaagcagcggcgacagaggggctgttgcaatatgtgcttgtagacccgccgactctgcatgatgcgcggggtacgcagacaactggttacaggttaattgataccactgacatgaaggacaaagaaaaccagaggcaggcgatttgtctgagctatgctgatctaggggttgccatgtgtgagattgccagccgtgcggatgagctgcatggacaaggtgtaggggtgaccgccactggcccagtcaggcagacctgggcagtgttggctgggttcttgctagagggaggactgggacatctggactacagatatggcagagaaaatgttgtagtccttggggtttgtattttgttgctgcttgggggtctgctatatagtatcaaagcctag

SEQ ID NO: 28020 - DNA, 909 bp, Emericella nidulans
atgttcagccgatttttcaaggcggtccccgccaggcctccggccttttcatcccctttgcctgtctaccaggctcgcactatggctactgtccggaaccagaggcccgttgaaagggcaaccttcacgatccgagatggtcctatcttccacggaaaatctttcggtgcccgtaccaccatttccggtgaggcggtcttcaccacgtctttggtcggatatcccgaatctttgaccgacccctcctaccggggccagattctggttttcacccagcctttgattggaaactacggtgttccgtccaccgagagggaccgccatggtcttctcaagtactttgagtcgcccaatctccaggccgctggtgtcgtcgttgccgacgttgcggagcagtactctcactggaccgctgtacagagtcttggtgaatggtgcgcccgcgagggtgttcctgctatctctggcgtcgacactcgtgccattgtcacttacctccgcgagcagggttcctcccttgctcgtatcacagtgggtgaggagtatgatgctgatcaggatgaggctttcaccgatcctgaacagatccaccttgtccgtcaggtcagcaccaaggctcccttccacgtgagcgcagccgatcctcagtgtcatgttgccgtccttgactgcggtgtcaaggagaacatcctgcgtagcctggttagccgcggtgctagcattacggtgttccccttcgattatcccatccacaaggtcgctcaccacttcgatggcgtcttcatttccaacggccccggtgaccccacccactgccaggacaccacctaccaccttcgccgcctgatggagacttcgcaggttcccatctttggcatctgcttgggtcaccagctcttggcccttgct

SEQ ID NO: 28021 - DNA, 933 bp, Emericella nidulans
ttgctcaagagcatccagaacattgtctgtggcctcgtgccaacgttcttcctgtttggctctgcagctgccgagctggactttgaacagtggcatccagcgggactgggagacttgcgctgcggctgcccggccatgaacagtcttgccaaccacgggttcatcaaccataacggcagcaacatcacggtcaacgaggtcatcccgttgatgcaagaggtctttcatctcagtgaagagctcgccacgattgtcacgggcctcgccgtcctctcggcggacgaccctgcctcgggtattttcaaccttgatatgctgaaccgccacaacattttcgagcacgacgcctcactgacccgaaaggatttctacctgggcggcgacggacatactattgaccagcccacgctggacgagttcctcagctacttcgacggcaaagaatggatcgacctcaacgacgccgcagcagcccgctatgcgagagtcctcgactcccgcgagaagaacccgagcttcctctaccaggaccagcagctcattacttcgtacggcgagacgatcaagtacttccgaaccatggtcgacccgcgctcaaacaagacatccgccgagttcgtcaggatcttgttcaccgaggagcggctgcccgtcaggaagggtggcagcgcccgcgagaagagatcagtgggttctcgctggccagcgatgtcgttcagctggcgctgcgcaccccagagaagttcattggcatgccgttcgaccagcgtccgtttgcagagcaggcctttgacccgctgccatggcagcggcctcccatctggactcccccgaactacccgggtttcagtaagaggcatttctctgagcttgtcgggaggtttgcgaagaaggcccttccgtttcgtgcttgatagacatctatctttctga

SEQ ID NO: 28022 - DNA, 960 bp, Emericella nidulans
gataagtcgcaacagcccagctcgttccagcagctggaaaagctcggagagggtacatatgctactgtcttcaaaggacgaaaccggcagacaggcgaacttgtcgccctgaaagaaatccacctcgactccgaagagggaacgccatcaactgccattcgcgaaatctcattgatgaaagagttgaaacatgagagtatcgtatcactctacgatgtgattcacacggagaacaagctcatgcttgtgttcgaatatatggacaaggatttgaaaaagtatatggacactcggggcgaccgagggcagttggatcaagcgaccatcaaatcgttcatgcaccaacttatgagtggtatcgctttttgtcacgacaaccgagtcctacaccgagatctgaagccgcagaacttattgatcaataagaaagggcaattaaagctgggtgatttcggacttgctcgcgcattcggcattcccgtgaacacattttcaaatgaagtcgtgacgctttggtatcgtgctcccgacgtccttctcggcagcaggacatataatacaagtatcgatatctggtcggctggctgtatcatggcagagctatatacaggccgccccttgtttccgggaacaaccaatgaggaccaactgcagaagattttccgcctgatggggacaccctctgaacgctcttggccagggatctcccagctgccggagtacagggccaatttccacgtatacgcaacacaggaccttggcctcatccttccccaaattgacccgctcggtctcgatctgttaaaccgaatgctgcaactccgaccggagatgcgaattgacgcccatggcgctctgcagcatccatggttccatgaccttccgcagctccaggcacagttgcagcaacagcaaatggccggatatggagggatgatgccaccgcaacaagcgtattag

SEQ ID NO: 28023 - DNA, 969 bp, Emericella nidulans
acttcgccctcgactatcaagcagagattcctctccaagccaaaccagctcggcgtagttgctgttggttttaatggcggccagtgcaagcttggcgttgtggctgctcctatggctctcgtcgaggccggccttctcgaccagcttcgcgatgatcttgactacgaaatacactacgataacaccgtacactactatgagaaggaggtccccgctgaagaccccgaccaccggggcatgaagaagccgcggggtgtcagcgccgtcacagaaaccctcaggtcgcaggtgtacgagcactccaaggagggcaagttcacgctaaccctaggcggagaccactcgatcgcaattgggagtatctccggcattgcaaaggcgacgcgcgagctgggacgggagattggtgtcatttgggtcgatgcgcatgctgatatcaacattcccgaaatgagtcccagtgggaatatccacggaatgccgatggcattcttgacgcggttggcgacggaggagaagaaggatatctttggttggttgcaggaggagcacaaggtcaacctccgtaagctggtgtatatcggactgagagatgttgatcgcggtgagaagaagttgctccgggagcatggaatcaaggcgtttagcatgcatgatgttgatcgccacggtattggtcgagtggtcgaaatggccctcgctcacatcggaaacgacaccccaatccatctgtcctttgacgtggatgcactcgatccccaatgggtacccagcactggaacaccggtgcgtgggggtttgactctttgcgagggagacttcatctgcgagtgtgttcacgagacaggaaacttgatctccatggatttggttgaggtcaaccccagcttggtagctgtgggggcttccgacaccattcggaccggttgctcgttggtgcgtagtgcgttgggagataccctgctctag

SEQ ID NO: 28024 - DNA, 969 bp, Emericella nidulans
gccgatcaggacgtggatctggattctatcattgacagactgctggaggtgaggggcagccggcccggaaagcaagtccaacttctggaatcggaaatccgctatctctgcacaaaggcgagggaaatctttatctctcagcccatcctacttgagttggaggcacctatcaagatctgcggtgatatccatggccaatactacgacctactccgcctcttcgaatacggtggtttcccaccggaagccaactacctcttcctcggagactacgttgaccgtggcaagcagtcactcgagacgatctgccttcttcttgcctacaagatcaagtatcctgagaatttcttcgttcttcgggggaaccacgagtgcgcttctatcaaccgtatttacggtttctacgatgagtgcaagcggaggtataacatcaagctgtggaagaccttcacagactgtttcaactgccttcccatcgcggctatcattgatgaaaaaatctttaccatgcacggtggtttgagccctgacctcaactccatggaacagatccgccgtgtcatgcgtcccactgatatccccgattgcggcctcctgtgtgaccttctatggtccgatcctgacaaagatatcacgggatggagcgaaaatgaccgaggtgtttcattcacatttggaccggacgtagtatcgcgtttcctccagaaacatgatatggatttgatatgccgcgcacatcaagtcgttgaggacggctacgagttcttttccaagaggcagctggttacactattcagcgctccgaactactgtggagagttcgataatgctggtgcaatgatgagtgtggatgagagtttattgtgctctttccagattctgaaaccagcagagaaaaaacaaaagtacgtttacggggcaatgagctcaggccgacccatcactcctccgcgaaagcaaaagaagtaa

SEQ ID NO: 28025 - DNA, 978 bp, Emericella nidulans
aggttcacccctctcttcctgctggccgctgtggccattgcctcccctgcgccggacctcaacgcccgtcatgaattgacccgccgccaggcctcagaaagctgcccgatcgggtactgcacacagaacggtggcactaccggtggtgcggccggtgacaccgtgaccgtgaccaatctggccgacctgactgaagccgccgagagcgatgggccgctgacgatcatcgtgtctgggtccatctcgggcagtgccaagatccgcgtggcctcagataagacgatctttggagagtcgggtagttctatcaccggtatcggattctacattcgccgcgtcagcaatgtcatcatgcggaacttgaagatcagcaaggtcgacgcagacaacggcgatgccattggcattgatgcctcctccaatgtctgggtcgatcattgcgacctctctggagacctcagcggtgggaaggatgacttggacggactggtcgatatcagccatggcgcggaatggatcaccgtctcgaacacttacttccacgaccattggaaaggttcccttatcggccactccgacaacaatgaagacgaggacctaggccatctgcacgtcacctacgctaacaactactggtacaacgtgtacagccgtacacccctgatccggttcgccacagtgcacatcatcaacaactattgggacagcctgatcgacacgggcgtgaactgccgtatggatgcacaggtgctgatccagtcctccgcgttccacaactgccccgacagagcgatcttcttcgccgactcagactacaccgggtatgctgtcgtagacgatgttgacctgggcggctcgagtaactcggtgcccgagggaaccctgacgcctagctccttgccttatgcggccattactgcgctgggatctggccaggttgcaagcgtgattccgggtacagccggacagaaattgtaa

SEQ ID NO: 28026 - DNA, 990 bp, Emericella nidulans
  unsure (1)..(990): unsure at all n locations
gactgccccatcccgcaaaccgagcttgacgagatctatgctttcgcaaccgatctcgcccgtaaagcgggccagttattgcttgagcgcgtcaacgatcgcaactctgagcaggtctacgccgagaaagagaatgcagtagacttggtgacgcagactgacgaggatgtcgagtcattaatcaaaacagccatacagaccaaatacccagcccacaaattcctcggcgaggaaagctacgctaagggagagagcagggaatacctgatcgatgagcagccgacctggtgtgttgatccattagacggaactgtaaacttcacccacgcctttcccatgttctgcgtctctatcggctttatcgtaaaccactaccctgtaatcggagtcatctacgcgccaatgctaaaccagctcttctcgtcatgcctcaaccgcggcgcatggctgaacgaaatgcaacaactcccgctcatccgcaaaccgtctatcccacctctaccagcaactgcaccatcgaagtgtatctttgcatgcgagtggggaaaggatcggcgcgatattccagacggtactctgcaaaggaagattgagagttttgtgaatatggcggctgaacggggatctcgaggtgggaagggagnnatggtgcatggggtgcggagcctggggagtgcgacgatggacctcgcatacacggctatgggctctgtggacatctggtgggagggaggctgttgggagtgggatgtggcagccggtattgcaatcctgcttgaagctggggggttggttactgcggcaaatccgccggaggacatagaggggccgattgagccggtgaagctaggcagtcggttatatctggctattcgacccgccggaccctcagaaacagaaacaggtcgagagacacaagaacgaacagttcgagaagtctggcgccgcgtccgccagctagactatgaaagaccggcgagacaatcatag

SEQ ID NO: 28027 - DNA, 993 bp, Emericella nidulans
ggttcagtcagcaaagccaatgttccaaagatcgatgtttctcccctgtttggagacgaccaagcagccaaaatgagagtagcccagcaaatcgacgccgcttcgcgtgatactgggtttttctacgccgtcaaccatgggatcaatgtgcagcgactctcgcagaagaccaaggagtttcatatgtctatcacacctgaggaaaagtgggaccttgcgattcgtgcctacaacaaagagcaccaggaccaagtccgtgccggatactacctgtccatccccgggaaaaaggcagtcgagtccttctgctaccttaacccgaacttcacgcccgatcatccccgtatccaggccaagactcccactcacgaggtaaacgtgtggccagacgagaccaagcaccctggtttccaagactttgccgagcagtattactgggatgttttcggtctctcttctgcactgctcaagggctacgccttggcattaggcaaagaggagaatttcttcgctcgccacttcaagccagacgatactcttgcctcggttgtgctgatccgctacccttacctggatccctaccccgaggctgctatcaagacggcggccgacggcaccaaactgagttttgagtggcatgaggatgtatccctaatcactgtgctttaccagtccaacgtgcagaacctgcaggtagaaactgctgccgggtatcaagatatcgaggccgacgatactggctacttgatcaactgcggcagttacatggcacatctcacaaacaactactataaagcgcccatccatcgggtgaaatgggttaatgcagagcgccagtccctgccattcttcgtcaacctgggatacgacagcgtgattgatccatttgatccccgagaacccaatggcaagtctgatcgggagccactctcctacggcgactatttgcaaaacgggctggtgagtttgatcaacaagaacggccagacctag

SEQ ID NO: 28028 - DNA, 1008 bp, Emericella nidulans
gctcccaaggtcggaatcaacggcttcggtcgtattggacgcatcgttttccgtaacgccatcgaggcgggtaccgtcgatgttgttgccgtcaacgaccctttcatcgagacccactacgctgcctacatgctcaagtatgactcacagcacggtcagttcaagggcaccattgagacctacgacgagggtcttattgtcaacggcaagaagatccgcttccacaccgagcgtgaccccgccaacatcccctggggccaggacggtgctgaatacattgtcgagtccaccggtgtcttcactacccaggagaaggctagcgctcacctgaagggtggtgccaagaaggttgtcatctctgccccatctgctgatgcccctatgttcgtcatgggtgtcaacaacgagacctacaagaaggacattcaggtcctctccaacgcttcttgcaccaccaactgccttgcccctctcgccaaggtcatcaacgacaacttcggtatcatcgagggtctgatgaccaccgtccactcctacactgctacccagaaggtcgtcgacggcccctcggccaaggactggcgtggtggccgtaccgctgctaccaacatcatcccctcctccactggtgctgccaaggctgtcggcaaggtcattccttcgctcaatggcaagctcaccggcatggcgatgcgtgttcccacctccaacgtctccgttgttgacctgaccgtccgcaccgagaaggctgttacctacgaccagatcaaggatgccgtcaagaaggcttctgagaacgagctcaagggcatccttggctacaccgaggacgacatcgtctctaccgacctcaacggtgacacccgctcttccatcttcgatgctaaggcgggtattgccctcaactccaacttcatcaagctcgtttcctggtacgacaacgagtggggttactcccgccgtgttgttgacctcatcacctacatctccaaggttgatgcccaatag

SEQ ID NO: 28029 - DNA, 1047 bp, Emericella nidulans
accggcgcatatccaacagcacctcagaaccccgggtccgctctgggatcgatgacatccccaaccaaccctcaaacacacatacaacaagcacatcccacgcatcaggcctctcctgttgttccatcccagtcccattaccagcaggcgcagaatgccccgggctcgatgcaccagcaaatgaactttcctcagtcatatggcgtcacgacggccatgccgccgcaaccatacggtatatctcccacccaggctgctgcgatggcgacggcagcggcttcagggcagttctatcctacacacggggattcgatagctggtcaaatggcacaaggcccgcgcggctcaccccgcatggcaggagtgccggtgaagactgaccggaatccccggtctccgcctcaaattcccggccagatgccaccgatgggttcgcaggtaccgctaacaccaaccgctcaaatgcagcagcgtcgcatgagccatgtcggtagcccgcacgtgcagaacgcccagcctgtcatgaatcacgttggtagaccttcagtgcctccgccgatgccacctcctcagcaccccgttcagcagacgcaaacttccccagacatgatgcctagtggcgcagaggagtcgccattgtacgtgaatgcaaaacagtttcaccgtatcctcaagcgacgcgttgcgcgacagaaattagaagaacagttacgactcacatctaaaggtcgcaaaccgtatctccatgagtcccgtcacaaccacgcgatgcgtcgcccccgaggccccggcggtcgattcctgaccgcagacgaagtggccgcgatggagaagaagaatgctgcaggtggacaggagaatgcagatccgaatgcttcaaaagcggtcagtgacagttcacctgcgtctcagaaacgcaaagccagtgatggcaataacgaaaaccctaactctgcgaagaaagcaaagaccggcgcccagaaagccagtaacaatgccgacgaaagcgaggcagagtccggcggtccctcggatgaagatggctga

SEQ ID NO: 28030 - DNA, 1056 bp, Emericella nidulans
gccgacatgagcggcgagcagatgcaggccaagattaccgccgccagacgcgaagctgaagggctcaaggacaagatcaggcgcagaaaggatgatcttgccgatacaaccttgcgtgatgttgcgcagaatcagaccgacgccttgcctcgcattggaatgaagccccggcgaacactcaaaggtcatttggccaagatctatgctatgcactggtccaccgaccgtcgccatctcgtgtccgcctcacaagatggaaaactcataatctgggatgcgtacactacgaacaaagtccacgccatcccgctcagatcatcgtgggtcatgacctgcgcttatgctcctagtggaaactatgtcgcctgcggtggtctggacaacatttgctccatttacaatctttcctcacgagagggcccgactcgtgtcgcgcgcgaactctccggtcattccggctacctctcctgctgccgtttcatcaatgaccgtcgaatcatcacttcttccggcgacatgacctgcatgctctgggatatcgagtcaggctctaaagtcaccgaattcgcagaccacttcggcgatgtcatgtcaatcagcatcaaccccactaaccagaacatcttcgtctccggtgcctgtgatgcttttgctaagctctgggatatccgtactggaaaggcagtccaaacttttgctggtcatgaatctgacattaacgccatccaattcttccctgacggcaacgctttcggaaccggttccgacgataccacttgccgtctcttcgacattcgtgcagacagatcactcaacacctaccagagcgatcaaatactgtgcggtatcacatccgtcggtttctcggtttccggaagattgcttttcgccggatatgatgattttgaatgcaaggtctgggatgttctccggggagacaaggtggggtctttaagcggccacgagaaccgtgtcagctgccttggtgtcagcaatgatggcatcagtctttgcactggatcttgggactctttgctcaaggtctgggcctggtaa

SEQ ID NO: 28031 - DNA, 1059 bp, Emericella nidulans
ggttgtggaatgagtaccgaggataaggagggcaaggcccgcaacgaggagattgagaaccagctcaagcgggacaagatgatgcagagaaatgagattaaaatgctcctgctcggtgccggagagtctggcaagtctacaattcttaagcagatgaagttgatccacgagggtggctactcccgcgatgagagggagtcttttaaggaaattatctacagcaacaccgtccagtcgatgcgtgtcatcctggaagccatggagtcactggagctgcctctggaagatgctcgtaacgaatatcacgtccagaccgttttcatgcaacccgctcagatcgaaggcgacagcttgccctcagaagttggtaatgccattgctgccctctggcaggatgctggtgttcaggagtgtttcaagcgatctcgtgaataccaactcaacgactccgccaaatactactttgactctatcgagcgtattgcccagagcgactaccttcccacggaccaggatgtcctacgctcacgtgtcaagaccactggtatcaccgagacgaccttcattatcggcgatctgacctatcgaatgttcgacgttggtggtcagcgttctgagcgaaagaagtggattcactgcttcgagaacgtcaccaccattcttttcctggtcgccatttccgaatacgaccagctgcttttcgaagatgagactgtaaaccgtatgcaggaagctctcactctgttcgactccatttgcaactcccgctggttcgtcaagacctcgattattctcttccttaacaagatcgaccgctttaaggagaagctccctgtcagccccatgaagaactacttccccgactacgagggtggtgctgactacgccgctgcctgcgactacatactcaaccgcttcgtctctctgaaccaagcagagcagaagcagatctacacacatttcacatgcgccacagacacgacacagatccgatttgtcatggcagctgtaaatgatattattatccaagagaacctgagactctgtggtctgatttaa

SEQ ID NO: 28032 - DNA, 1062 bp, Emericella nidulans
acgatggttattgagaaccagaaccgccagtatggcggcggaatggggtttgacagtgtttaccagcatccgcaccacagtcaaccaccgcagttctcagatccttggaccaccgcccattcgtcatcccactcgacgccccccgtatatccagcttccgtgggcatcaagcaggacgagactagccgtccttctcacatccctatgccatactcggtctctgtttcggctccctcgatcgtggcaggcagtaactactcgtccgcgtctacgtctgcgagctacccggcccccgacatgatgggccttccccatgagatcccccggacctcgttcgaccatgctcctgcctacaccacagctccctcgatcagcagctttgcgccagccagctatgcgcccatcagttacgcttctccggttcaccaggacaaccgcaggatatcccatgctgatgcttcccgcgttgcttcatcccaatccacatcaggcccgacatttggagacgcgctggatgccagtcgcggaatggtggctctcagccaggatctgacaccccgaaatatctatgggcctcgaggatctcgaggctcgggcgattcctacggattccccctagcacactcggctggttcgtctatctcatctgcaggctcttacccatactacagcgcgtccgtcgcgtcggtagagtcgtctgtcaccgattacagctcaacaacttcagagtcttacgaaaatggccacttgtcacgcacactcccacgcccgtccactcttctcaccggcagtgctcctccgggccctcaatcgatgatgagccagttcagttcgaaaatgccgtccaacacccagaagaagcacaagtgcaaggtgtgtgacaagcggtttacccggccatcctctttacagacccatatgtacagtcacactggcgagaagccattcgcttgtgacgtggaaggctgtggtcgacacttttccgttgtctctaacctccgtcgccacaagaaggtccacaagggcgggaaggagggaggttcaggcgatgacgaagagtaa

SEQ ID NO: 28033 - DNA, 1071 bp, Emericella nidulans
cttcacgtaacttgccaaggtaccccctccgaaatcggctatcaccatggctctgctgccaaaggcgagattgcgaaagccattgacttcgcaactggcctcattcatggcaaaacaaaaaagacacaggcggagcttgaacagctcctcagggagttggagcaggtgatgaaacagcgctggccgagatactatgaggaaatctgcggaatcgcaaagggtgcggaacgcgaagtatcggagattgtcatgctcaacactcgtacggaattcgcgtacgggctcgtagaagcccgggacgggtgcaccactgtttactgcaaaacccccaatggagcgctacagggccagaactgggacttcttcaccgcaaccaaagaaaacttgatccagttaacaatttgtcagccgggtctacccactatcaaaatgattacagaagctggtatcattggcaaagtgggtttcaacagtgctggtgtcgctgtcaattacaatgcactacacctacatggcctccgtcccactggcctcccctcgcatctcgcgctgcgcatggccctcgaaagtacatctccgtctgaggcgtatgaaaaaatcgtctcgcaagggggcatggcggctagcgcgttcatcatggtgggcaacgcacacgaggcctacgggctagagttctcgcccatcagcttgtgcaagcaagttgctgacaccaatgggcggatagtgcatacgaaccactgcctcctcaaccatgggccatcggcgcaagagcttaatcccctgccggactcgtggagccgccacgggcggatggaacatctcctctctggttttgacggcacgaaggaggcatttgcgaagttgtgggaggacgaagacaactaccctctctcgatctgccgggcatataaggaagggaaaagtagaggctccactcttttcaacatcgtcttcgatcatgtgggccggaaggcaacagtgcggctgggccggcccaataaccctgatgagacctttgtcatgacctttagcaatctggataccaagtccgcgatccaagccaacatttga

SEQ ID NO: 28034 - DNA, 1077 bp, Emericella nidulans
gcatcccttcgctccgtactcaagagccagagcttgcgacacaccgtgcgatcctactcctcgcaaaccatgcctcccgcctcaccctttgctccccgccacttcctctccattgcggacctctcgccctccgagttcgcaacccttgttcgcaatgcctcctcacacaaacgggctatcaagtcggggtcaatgccccaaaacttgcagggatcactccttgggaaaactgtggccatgatcttcagcaaacgaagcacgaggacaagggtatctacagaaggggccgttgtgcagatgggaggtcatccgatgttcttgggcaaggatgatatccaactaggtgtcaacgagtccctatacgacacctccgttgtcatttcgtccatggtatcctgcattgtagcccgtgtcggtaaacatgcagaggtcgcagatctggcgaagcactcttcggttccagtcatcaatgctttgtgtgactctttccaccctctccaagccgtggccgatttccagaccatctatgaagcattcacccccaaggcgcaccacctttcaagtctagggttggaaggattgaagatcgcttgggtgggtgacgccaacaacgtcctgttcgatatggccattgctgctacaaaaatgggtgtcgacattgctgtcgctactcccaaggggtacgaaatccctcctcacatgctggagctcatcaagtctgctggagagggtgtctcgaaaccaggaaagcttctgcaaaccaatattcccgaagaagcggtcaaggacgccgatattctggtcacagacacctgggtctctatgggccaagaggaagagaaggctcagaggctgaaggagtttgatggtttccaaatcactgctgaactcgccaagcgaggaggagctaaggagggctggaagttcatgcactgtctcccgcgacaccctgaggaggtcagcgacgaggttttctacagcaaccggtcacttgtcttccctgaggctgagaaccggttatgggctgcgatttccgccttggagggtttcgttgtcaataagggaaaaattgaataa

SEQ ID NO: 28035 - DNA, 1098 bp, Emericella nidulans
acttcgcagcggccaacatcatcctcttcctccctgctggatattgtcgcaaatctcgcttcgccaaagtctttgctttttaacgctcatcacaccaacccccctccttccctgccgtctcaacgcgcaccaacgatggataagtcgcaacagcccagctcgttccagcagctggaaaagctcggagagggtacatatgctactgtcttcaaaggacgaaaccggcagacaggcgaacttgtcgccctgaaagaaatccacctcgactccgaagagggaacgccatcaactgccattcgcgaaatctcattgatgaaagagttgaaacatgagagtatcgtatcactctacgatgtgattcacacggagaacaagctcatgcttgtgttcgaatatatggacaaggatttgaaaaagtatatggacactcggggcgaccgagggcagttggatcaagcgaccatcaaatcgttcatgcaccaacttatgagtggtatcgctttttgtcacgacaaccgagtcctacaccgagatctgaagccgcagaacttattgatcaataagaaagggcaattaaagctgggtgatttcggacttgctcgcgcattcggcattcccgtgaacacattttcaaatgaagtcgtgacgctttggtatcgtgctcccgacgtccttctcggcagcaggacatataatacaagtatcgatatctggtcggctggctgtatcatggcagagctatatacaggccgccccttgtttccgggaacaaccaatgaggaccaactgcagaagattttccgcctgatggggacaccctctgaacgctcttggccagggatctcccagctgccggagtacagggccaatttccacgtatacgcaacacaggaccttggcctcatccttccccaaattgacccgctcggtctcgatctgttaaaccgaatgctgcaactccgaccggagatgcgaattgacgcccatggcgctctgcagcatccatggttccatgaccttccgcagctccaggcacagttgcagcaacagcaaatggccggatatggagggatgatgccaccgcaacaagcgtattag

SEQ ID NO: 28036 - DNA, 1131 bp, Emericella nidulans
gtcctttatgacggtggctctcacgccaaagaccagcctggtctcctcggaaccactgagaacgagctcggcatcagaaagtggattgaggagcagggtcacactcttgtgaccacctccgacaaggacggcgagaactctactttcgataaggagcttgttgacgccgaagttatcatcaccactcccttccaccccggatacctcacagctgagcgtctggccaaggctaagaacctcaagcttgctgtcactgccggtattggctccgaccatgtcgacttggacgctgccaacaagacaaacggtggtattactgttgctgaggtcactggttccaacgttgtctccgtcgctgagcacgttgtcatgaccatcctcctcctcgtccgcaatttcgtccccgcccacgaccagatccgtaacggtgactggaatgtcgccgctgttgctaagaacgagttcgaccttgagaacaaggttgtcggaaccgttggtgttggccgtatcggtgagcgtgtgctccgccgtctcaagcccttcgactgcaaggagctcctctattatgactatcagcccctgcgccctgaggttgaaaaggagattggcgctcgccgcgtggactctctcgaggagatggtctctcagtgtgatgttgttaccattaattgccctttgcacgagaagacccgtggtctcttcaacaaggagctcatttctaagatgaagcctggtaaatctgctcttttatatttgattattccgatgctaatgtatcacaaaggttcatggctcgtcaacactgctcgtggcgctattgttgttaaggaggatgttgctgaggctctcaagtccggccacctccgcggctacggcggtgatgtctggttcccccagcccgctcccaaggagcacccactccgctacgccgagcacccttggggcggtggtaacgctactgttccccacatgtctggtacctccttagcagcccaaatccgttacgccaacggcaccaaggccattctggacagctacttctccggccgctttgactaccagcctcaagacctgattgttcacggtggtgactatgctaccaaggcctacggtcagcgtgagaagaaatga

SEQ ID NO: 28037 - DNA, 1146 bp, Emericella nidulans
gtcgcccccaagtcagaacccctaaacgaaggctcgatcagttcatccgtctcaacgccagaccccgagggtgaggtcttgacgcaagatgtcgcccagacacagaagcggaagggtggcaggaaacctatctatgcgacctcggaagagcgtaagcagcgcaatcgccaggcccaggcggcctttcgtgagcgtcgcacagagtacatccgccagctcgagtccaccatcaagcgcaatgaagagtccctgcagaccttgcagcagaatcatcgcaccgctgcagatgaatgcttgatgctgcgttacaagaattctcttctcgagcgcatccttcttgaaaaaggaatcgatgttcaagctgaactacgcttgaaagcgggaacgcccaatggcccggggaaacctagtcctataactactaaagctccatccctgcaacaagctgcaattagccgaagctcggcccaacgacaccctagcggcctcgcccccaaggagcctttcagtgttccccagtcgcgcgatggtggcttcggtatcccgtcgccccagtttcaggctacgcctccctcccatgtctcctcaccatcgcacgccaagtcacccaactacgggttccagggagctttgtcgcctgccggtgtcgatcctcaagcacagcggtcccaaatgctcactcactcgagaaacataagccaaacttctccacccatgagcgttggccagcctgagcccaccgaaccgaagtctgccgtatcggctagtatgggctctcgagctccccgtctcccttctgcgtactatccatcgccatttcagaaacattatgatcaattagaacaagaatatgatgcgcaagcggacatgattgatgacgagcacgaatcatctgtcggtacttcatctttcgtacccgggtacaacccctcaagctcagtctcgaatgcttctcaccccatgaaccctcatggtatgaatccatacaaccactcttctggggaagctgtcaacggggcatacggcaatacgagcgccatgatgggaaactatgagccgatgctagacgccgatccatttggactgagcgccagtatgcactttcagaccccgttcagctacgagcaaaataatgcacgtcaatga

SEQ ID NO: 28038 - DNA, 1161 bp, Emericella nidulans
gcagcccctccagcacctcagcctccaagtctgctcggctaccaccgggttctctcgcccttggccggaatccgcgtctccccgctctgcctgggcactatgcatttcggcgggcaatggatgcgggcaatgggcgatgtgacaaaagaaacggcgtttgccctcctcgaccggttctacgaagccggcgggaacttcatcgacacggcgaatttctaccagggtgagggcagcgagaagtggctcggggagtgggtggcatcgcgcgggaaccgcgacgagctcgtcctcgcgaccaagtacacgatgtcctacagactgacagggcccgagaagatcaagtctaatttccagggcagccactcgaagagtctccgtctgtcggtcgaggctagtctggctaagctccgcacggactatatcgatctgctgtatgtgcatatgtgggatttctctacgagcgtcgaagaggtcatgcagtcgctgcaccatcttgttgccgcaggcaaggtgctcaatattgggatcagtgatgccccggcgtgggttgtcgccaagtgcaatgagtacgcacggtttcacggcctcactcgcttctgtgtctaccaaggccgctgggcatgttcctaccgcgactttgagcgcgagatccttcctatgtgccagtctgaagggcttgcgctcgcaccctggggtgctctcggccgcggccagtacaagtcggccgaagagttccagcaagaagggacgcggaacatgggcccccaggaagagaagcaccggctgatgggcgcaaagctgaccgaggttggggagcgcaaaggcgtggccgcggctgcgattgcgctcgcatacctgcttcacaagtcgccgtacgttttcccggtgatcgggtgccggacggtcgagcagctggaggcgaatattacgagcctcggtgtagagctcagtgatgaggaaatctacgagattgaagacacgatcccttttgatgtcggcttccccatggcgttcttattcgaatcgccccagcagaagtaccgtagtgatatgacgaccaggcatatctggcaggttacctgcaatgcccggatcgagagtgtgcctaagccgagacctatcgagccaaagcaggggtacaagcagatggatcggaagtag

SEQ ID NO: 28039 - DNA, 1194 bp, Emericella nidulans
gtgccctgcagcaaggaaaaggacaagaatatcctcattgtcatcgtcggtgccggacttattgggccccgtcacgcacaatccgtgcaacgacacccacgaacccagctgatcgcttttgttgacccttcaccctctgcaatcccggtcgcagaatcatttggcgttccttgctatgattctattacgtctatgttagacgttgtcggtaagacaaccgggaaaccagacgcggcgatcgtgagcacgcccaatcacacgcacgtggacgtcacgctccagctgctggagaacggaatccgcaatatcctccttgagaaaccgatcagtgacgatctggagtcggccgagcacctcctcgctaccgtcaaggaacagaaatgtaaagatgagaagagaggcaaggatgcgaagatcaacatccagatcggccaccaccgccgcttcaatccgtacatccaaaccacaaagtctttgttagagacagactcactcggcaccgtcgttgcagtgaacggcctctggacacttctgaagccggcctcttacttcgcgccgccgctcggttcttggcgcgcagataagaagaagggcggcgtgctggggattaatcttatccacgatatcgacgtgctgcagtttctgtttgggcccgtcagtagggtctacgcggagggtacactcctgcagcgcatgcgccagaacccggaacataccgccgaggaaggctgtgctgtgacgctgcgctttgcgtctgggatagtaggcacatttctcatctgcgacgcgacgccttcgccgttgaactttgaaacaggaacgggcgagaatcctacgattccgcccgctccttccaagagtgcaagcgactgttatcgaattcttggaaccagagcgagtctcagtgtgcctgatatgacgcgctggagctatgaccatgtttcttgtggacaggggaaagagaaaggctggaatacggagttggcgatgcagcagatttcagtgaaggatgctgatgtgaggccgtttgatgcgcagtggggatattttgttgatgttgttagtggaaagggtgaggatggcgagcgaggagttggctgtggcgttgaagatggggtgagggcgctcagagttgttcaagctgttagggagagtatggagggaggcaagcctgtggatgttcaaagtgtataa

SEQ ID NO: 28040 - DNA, 1200 bp, Emericella nidulans
gtttctatggtcgaggcctccattttgaaccataatgacatggccatggaccaggtcgcccccaagtcagaacccctaaacgaaggctcgatcagttcagccgtctcaacgccagaccccgagggtgaggtcttgacgcaagatgtcgcccagacacagaagcggaagggtggcaggaaacctatctatgcgacctcggaagagcgtaagcagcgcaatcgccaggcccaggcggcctttcgtgagcgtcgcacagagtacatccgccagctcgagtccaccatcaagcgcaatgaagagtccctgcagaccttgcagcagaatcatcgcaccgctgcagatgaatgcttgatgctgcgttacaagaattctcttctcgagcgcatccttcttgaaaaaggaatcgatgttcaagctgaactacgcttgaaagcgggaacgcccaatggcccggggaaacctagtcctataactactaaagctccatccctgcaacaagctgcaattagccgaagctcggcccaacgacaccctagcggcctcgcccccaaggagcctttcagtgttccccagtcgcgcgatggtggcttcggtatcccgtcgccccagtttcaggctacgcctccctcccatgtctcctcaccatcgcacgccaagtcacccaactacgggttccagggagctttgtcgcctgccggtgtcgatcctcaagcacagcggtcccaaatgctcactcactcgagaaacataagccaaacttctccacccatgagcgttggccagcctgagcccaccgaaccgaagtctgccgtatcggctagtatgggctctcgagctccccgtctcccttctgcgtactatccatcgccatttcagaaacattatgatcaattagaacaagaatatgatgcgcaagcggacatgattgatgacgagcacgaatcatctgtcggtacttcatctttcgtacccgggtacaacccctcaagctcagtctcgaatgcttctcaccccatgaaccctcatggtatgaatccatacaaccactcttctggggaagctgtcaacggggcatacggcaatacgagcgccatgatgggaaactatgagccgatgctagacgccgatccatttggactgagcgccagtatgcactttcagaccccgttcagctacgagcaaaataatgcacgtcaatga

SEQ ID NO: 28041 - DNA, 1209 bp, Emericella nidulans
cattcgttcaagcgctcactcctccttctcggagccctccttcctgccgtctttggagctcccgtcgagcctcgccgagcagctgaaaaggttcccggaaagtacattgtcacattcaagtccggtctcaacgttgaccagatcgatgctcacacctcttgggcctcgaacgtccacaagcgcaacctcgagcgtcgcggcctagctgaacgggaccagtactctggcattgagaagaattacaagatcaacaagttcgcggcttactccggctctttcgacgatgccactattgaggagatccggaatagcgcagatgttgcccacgtcgaagaggaccaaatctggtacattgacgccctgacctcccagagcggcgctccctggggtcttggagccatctcacacaagggcgaagcgagcaccacctacgtctatgacaccagtgcgggagagggcacttacgcctatgtcgtggacaccggcatcaatgccgaccacgaggaatttggcggccgcgccagccttgcctacaacgctgttggtggccagcatgttgacagcgtcggccacggcacccatgttgctggcactatcggcggtgaaacctacggtgtttccaagaaggcgaaccttctgtccgtcaaggttttccagggcgaatctagcagcacttctattattctcgacggtttcaactgggctgcgaacgatatcgtgagcaagggccgcaccggcaagagcgcaatcaacatgagcttgggtggtggatactcttacgccttcaaccaagctgttgaggacgcatacgacgaaggcgtcctctccgttgtggccgctggaaatgacaacatcgacgcttcagacagcagccccgcctctgcgccaaatgctcttactgttgccgccagcaccaaatcgaacacccgggcatccttctccaactacggtagcgttgttgatatctttgcccctggtcaggatatcctctccgcttggattggctccactactgctactaacacgatctctggtacctccatggccacaccccacgtcgtcggcttgtctctgtacctgatcgctctcgagggactctcctctgccagtgctgtggtttcccgcattaaggaactcgctactcagggcgttctctccaacgttcaaggcagccctaacttgcttgcctacaacggtgccgacgaatag

SEQ ID NO: 28042 - DNA, 1215 bp, Emericella nidulans
aagaacgtggttcgccggaagctaaccggctatgttggtttcgccaaccttcccaaccaatggcaccgcaagagtgtccgcaagggattcaacttcaatgtgatggttgtcggtgaatccggactcggaaagtctacgcttgtgaacacccttttcaatacttctctttaccctccgaaggagcgcgcgggacctagtcacgacatcatacccaagaccgtctcgattcaatccatcagcgcggacatcgaggagaatggtgtccgccttcgtttaaccgtcgttgacacccctggattcggcgactttgtcaacaacgacgattcctggcgccccattgtggaaaacattgagcagagatacgatgcttacctcgaggctgaaaacaaggtcaaccgtacgaacatcattgataaccgcatccacgcctgtgtttacttcatccagcccaccggtcactctctaaagccgcttgatatcgaggttatgcgcaggttacacaccaaggtcaaccttatccctgtgatcgctaaggctgatactctgacggatgatgaaatctccatgtttaagaagcggattctcgccgatatccagcaccactcgattcaaatcttcgaagggcctcgctacgaacttgacgacgaagagactatcgcagaaaaccaagaaatcatgtcgaaggttccttttgccgttgtcggtgccaactcagaggttgctacatccgatggccgcaaggtccgtggccgtagctacccctggggtatcattgaggtcgacaacgaggagcactgcagcttcgtcaagctgcgccagatgcttattcgcacccacatggaagagctcaaggagcacactaacaaccatctgtacgagaactaccgctccgacaagcttactcagatgggtgtcgcccaagacccaagcgtgttcaaggaagtcaaccctgctgtgaagcaagaagaggaggatgctctgcacgaacagaagcttgccaagatggaggcagaaatgaagatggtcttccaacagaaggtagcagagaaggaaagcaaactgaaacagagcgaagacgaattatacgctcgacatcgtgagatgaaagaacaactggatcgccaacgcgcagagttagaagagaagaaagcccgcctcgagagtggacggccactcgaagaaaagggaaagaggaagggattctctcttcgttaa

SEQ ID NO: 28043 - DNA, 1236 bp, Emericella nidulans
tcgaactactcgcattcaagcaataatcccttccttaaggtgtcaacgaaagaggataaaccctcgtcgtttcataaaatcgcagaggacgaagagtacgaggtgacgtcaccaaccgatgcaacctttcgagcctccaagaatgccgacaactcagctggtggaaataacccgctcgagagtggtcgagctggagaatcgggcgatggaatacgctttggaagagacccctttggtaatttccagggtggtgcggaaggccaggacgagtcctccatcgaccctaatggcttccgccctacgggtggccccgatcatggctttcccaacaattacgccctgggccgtcgaacatccgtatctgctgaatctctgaaccctacatccgcgggatcagacagctggaccccgccgagccacccgaaatctgaagaacagctcgcccggttgaagacagctgtcagcaacaacttcctcttttcccacctggatgacgagcagtccaggacggtactagatgctttggttgagaaacctatacccgcaaaagatattaaagtgatctcccaaggggatgccggcgactatttctacattgttgaagagggccatttcgacgtttatatcaatccctctggctccgtgcaaccgggcccagacggggctggcaccaagatcagcacgatcggccctggcggctcgtttggagagctggctctaatgtacaacgcgccgcgagcggcaaccattgtatcgacagagcctaaaagcactctatgggctttagaccgtataaccttccgacgcattctcatggactcggcattccagcgacgacgcatgtatgaggctttcttggaagaagtcccgctcctgtccagtctcaaaccttacgagcgggcaaagatcgcggacgctctcgacacaatcaagtttccggccggggaatatatcattaaagaaggtgatccgggagacgccttttacctgcttgaatccggcgaggccgaggcttttatggagggcgtcgaagaacccgtgaagtcatacaaaaggggagattacttcggtgaactggctctactagacgacaaacctagagcagccagcgttcgcgcgaagacggaggtcaaggtcgccaagcttggtagagatggattcaaacgtctgttgggcccggtggaaaacatcatgagaaggacggaatactcgtcgaggccatctacagctacataa

SEQ ID NO: 28044 - DNA, 1248 bp, Emericella nidulans
tctggatacaaaactgttggttattttgttaattgggtacgtacttcctgtctcctaccaatatatatatctttcactaacgatcgacaggccatctacggccgcaactacaacccccaagatctccccgcggagaaattgacccatattctttacgcattcgccaatgtcaggccagagactggcgaagtctacctttctgacacctggtctgatatcgagaagcactaccccactgattcttggaatgataccggaaacaacgtctacggctgcgtcaagcagctgggcttgcttaagcggcagcacagacagctcaaggttctcctttcgattggaggatggacctattctcccaactttaccaacggagctggtacccctgagaacagagcccgctttgcgcagactgcgacaaagctcatcactgaccttggttttgatgggatcgatattgattgggagtatcctcagaacgatcagcaggctcagaactacgtggatctcctacgcaggtgccgtgaagctctgaatgccgctcagggccaacggaggttccagcttactgttgctgtcccagcgggtccggataattacaataagctccggctacaggagatgacgccgtacctagacttttacaatcttatggcttatgactacgccggtagctgggatcagaccgctggtcaccaggcgaatctctacccctcgaccagcaaccccacgtccactccctttaacactgtccaagctgtgaaccactatatcgatgccggtggtgtcccatcaaacaagattatcctaggcatgccaatttacggccgtgcctttcagaacaccgatggccccggccgaccttactctggtataggccaagggacgtgggagcagggtgtttatgattacaaggcgctgcccagaccgggtgccaccgagcagctggataccaacattggtgcgtcctggtcgtatgatccttcgtcccgtgaaatggtttcgtacgatactgtggctgcggccgacctcaaggccgcctacattcagagccgccggctcggcggagctatgtggtgggaaactagtgctgataagggcggcaagactgcgaacaaggctgacggcagcttgattggcacctttgtcgaagatgttggaggcgtcaataacttggatcgcacacagaacgccatcagctaccccgacagccagtacgacaacctcaaggctggcttcccgtcgtcctag

SEQ ID NO: 28045 - DNA, 1248 bp, Emericella nidulans
ccgcaaccaggatcgtcagtggatttctcaaatctgctgaaccctcaaaacaacacggccatccctgccgaagtctccaacgctacagctagtgctaccatggcttcaggagccagtctgttgccacctatggtgaagggcgctcgcccggctgcagaggaagctcgtcaggaccttcctcgaccatacaagtgccccctgtgcgagcgcgccttccaccgcctagaacaccaaacaagacacattcgcactcacactggtgaaaagccccatgcctgccagttccccggctgctcgaagcgtttcagtcgctcagatgagcttacccggcactcgcgaatccataacaaccccaactcaagacgtggaaacaaggctcaacacctggcggcagccgccgcagctgcagctgcgaaccaagatggtagcgcgatggcgaacaacgctggatcaatgatgccccctcccagcaaacccatcactcgatctgctcctgtctctcaagtcgggtccccggacatttcgcccccgcactctttctccaactatgccaaccacatgcgctcgaatctgagcccctactctcgtaccagtgaacgggcgtcatcaggcatggatatcaaccttcttgctacggccgcgtctcaagtcgagcgtgatgaaagttttggattccgctctggtcaacgtagtcaccatatgtatggtccccgccatggcagcaggggacttccttctctttcagcctacgccatctcccacagcatgagccgttcccattcgcacgaggatgaggattcttatgcgtcacatcgcgtcaagcgttcaagacctaactcacccaactcgactgctccttcttcgcctaccttctcccacgactccttatctcccactcctgaccacacgccattggctacgcccgcccattcgccacgactgaagccattgtcgccgagtgagctacatctgccctcaatccgtcacctatcgcttcaccacactccggctctcgctccaatggagccccaggccgagggacccaattattataacccgaaccaacctcatgttggcccaagcataagcgatatcatgtctcgccctgagggtgcacagcgaaaacttccgatacctcaggtgcccaaagtggcggtccaggatatgttaaatcctagcgggtttacttcagtctcttcatcaaccgcaaattccgttgctggtggtgacttggctgagaggttctaa

SEQ ID NO: 28046 - DNA, 1263 bp, Emericella nidulans
tctctcaccagcaagctttccatcacagatgtggatctcaaggacaagcgtgtcctgatccgagttgacttcaatgtgcccctcgacaagaacgacaacaccacaatcaccaaccctcagcgtatcgtcggtgctctgcctaccatcaagtatgccatcgataacggcgccaaggccgtcatcctcatgtcccaccttggccgtcctgatggcaagaagaaccccaagtacagcttgaagcccgttgtgcccaagctcaaggaactgctcggccgcgacgtcatctttactgaggactgcgttggcccagaggtcgaggagactgttaacaaggcctccggtggccaggtcatccttcttgagaacctgcgcttccacgccgaggaggaaggaagctctaaggatgcagacggcaacaaggtcaaggccgacaaggacgcggttgcgcagttccgtaagggattgactgctttgggtgacatttacatcaacgatgcctttggtaccgcccaccgtgctcacagctccatggtcggtgtcgaccttccccagaaggcctccggattcctcgtcaagaaggagctcgaatacttcgcgaaggccctcgaggagccccagcggcccttcctcgccatccttggtggctctaaggtttccgacaagatccagctaattgacaacctccttcccaaggtcaacagcctcatcattaccggaggcatggctttcaccttcaagaagactctcgagaacgtcaagattggaagcagtctcttcgatgaggccggcagcaagatcgtcggtaacatcatcgaaaaggccaagaagcacaacgtcaaggttgttcttcccgtcgactacgtcactgccgataagtttgccgccgatgcgaagactggctacgccactgatgagcagggtatccctgatggttacatgggcttagacgttggcgagaagagtgtcgagtcctacaagcagaccattgccgagtccaagactattctgtggaacggaccccccggtgtctttgagatggagcccttcgctaaggctaccaaggctactcttgacgctgctgtggcggctgttcagaacggtgctaccgtcattattggtggtggtgacactgctaccgttgccgccaagtacggcgctgaggacaagattagccacgtttctaccggtggtggtgcctcgctggagctcctggagggcaaggaactgcctggtgttgctgctctctctgagaaaagtaagtaa

SEQ ID NO: 28047 - DNA, 1332 bp, Emericella nidulans
agccaaatattgacagctccgcaagcggaggcactacacaaagccatgctcgcttacctttcagtgataaatgcgccccaaactgccgaaacgctacgcgaagagcttcatttcgatgagagttacaatgaagccacatgtaagaagttcgaaggggtattggagaaaaaatggacgggaattgcccgactgcaaagaagaataaatgatttagaggccgaagtccgtagtcttcaagctgaacttgaagcctccccgtcagcagcccgtgcgaagaaccaagatccgaccaattggcttcctaaaccgtcatcgacacatacattgacatcgcaccgagacgctgtgacttgcgttgcgttccatcctgtgttcacatcgctcgcatccggttctgaagattgcacgataaagatatgggattgggaacttggggaaatagagcggactctgaagggccatataagaggtgtctcaggtcttgattatggtgggcaaaaaggaaataccctactagcgtcctgttctagcgatcttacaatcaagctctgggacccaagcaaggactatgcaaacattcggacactctcaggtcatgaccactcagtctcatccgtgcgcttcttaacgtccaatgataaccacctcatatccgcaagtagagacggaacactgcggatatgggatgtttcgaccggattttgtgttaaggttatcaagtcagcgacagagtcctggatccgagacgtgtcgccttcgtttgatgggaaatggctcgtatccggcggccgggatcaggcaataacagtgtgggaagtctcatcagccgaaccaaaggccgcgttattaggccacgagaacttcatcgagtgctgtgtttttgcccctccagcaagctacgagcatttagcaacactagctggactcaaaaaaccccctcccgcgacaagttcctgtgaattcgtcgccacaggagctagggataaaactatcaagctctgggaagcgagaggaagactgataaagactctgcacggccacgacaactgggtgcgaggtctcgtattccatccaggtggaaaatacctttttagtgtttctgacgataaaacgatacgttgctgggatctttcccaggaagggagattagtcaagacaatctctggcgctcatgagcattttgttagttgcataagatgggcgcctagccctaatactgataaccccgatcccgccggcgagaaggctggtaaaaaggacgccgttaagccttcgtaccgatgtgttattgcgacaggatgcgcagataactctgtacgggtgttcagctaa

SEQ ID NO: 28048 - DNA, 1338 bp, Emericella nidulans
gatactccgcctgaaatactccctgcttgcgagctgttgggacgtggtatcactctatttccaggatctaatttattcgactacctagaaattttagggggcgttgagaaggtccagcttctaaatttcaacctaaacaataagccgactacagttcctggatcgaataagcaatatctagttcgagaggatgtctttattcttcccgcgggaacagaaattatcgctgaaaatttactttgtacaactggagccgctttagcgaatgagttggcaatcaatccatcaatggcctatcgttactttggtatatcggcggagcgtaacgggaaaattggctacagggtatctttcaatgatagatatctgtttggcctctggagcatcggtgatctcaattatactgtccagtttgatatgcaaagcctggaaaggtgtattaacgccgacttcatctgggcggcaagaagactcccttgctgggacgagaatgatgcttcagcgcgagacgcgtttgcaaagtttttcgcgacatggggcacacatgttaccacaggttgttgtcttggagcgcgataccagctccaagtcacaaggcctgacgcatctgacgaatcgaaaaagaacttccacgaacatattgaaacagagtatagctctgtcctcggcattaatggtgggacaagagacacagctcaatacagagaatacttaggccgacgtgagagcaaatgctctgtcatgggtgggcatccacagctaaagagaagcttgtcaagagatccgactaactccaggctattcagtcagtggattagaagtataggcgcaagtggaacgcaagacgttattcacgtgttggctgacagcatttacaatttcctcctcaggagccccaacccggaacacaaggaaattggggacaagattcagagagcctcgcggttccattcgaagtttattactgccacaggagtttttaaggtgaagggcattggcggcgcaacaggtcgtgtcagctcttgcgaggttcggggtgctcctggcatcagcttacaagtgatcccccgtcgaggaactgcagcttcctccctgtcaaaaatcaagtttgaagcacttcaattgtctggtgatgagattgagtgtgatgtcattatgagcgcaccgcccctgacgccggttgaggtggtccttgcatcatcgaaggaagagttatctcaagacaatcctttcgtgtttgacctgcagttgcagctttatccggaacatctatcaggagcaataactgtggtctgggtaacaagggtcatgaaggaaaggtcaccctgccaagtttga

SEQ ID NO: 28049 - DNA, 1344 bp, Emericella nidulans
ccagtcaccgagttctccttcaaagatccttacacctatcagaatgggttcgattcttaccatgaatctgaagccatcgaaggcgccctccccgtagggcacaactctccccagaaagctccttacggcttatatgccgaaaagctctctgggaccgctttcactgctccccggcacgagaacaaacagacttgggtctaccgtatccttcccgccgcagcgcacgagaacttcgttgaagaggatgcgagctcttaccacacgctctcagatgccaaaaagcttcagcatatccccaaccagctacggtgggatccattcgatctggacgagaccgtcgactgggttcatgggttgcaccttgtggctggttctggagaccctaccgtaaaacaaggcctgggcatcttgctgtatgcggcggggaaagatatgggaaaggaagctttctactccgcggatggcgacttcctgatcgtagcacagcatggcgtgctcgatattcagactgagcttggccgcttgctggttcggccgaacgagatttgcgtgattcctcgtggtgtaagataccgtgttaccctacccgacggtcctgtgagaggctacatttgcgagctctaccagggccactatcagctacccgaattaggacctattggatccaacggtcttgcgaatgcacgagactttcaagcaccagtggctgcctttgacgacgaggaaggaccgacggaataccgactgtacagcaagttcaacaaccacctcttctccgcgcgccaggatcacaccccttttgacattgtcgcatggcatggcaactactacccctacaaatatgaccttggccgcttcaacaccatgggctccgtatcattcgaccaccctgacccctccatctacacggtgctcaccggcccgtccgatcatgtgggtactgctattgctgactttgttatttttccgccgcgctggttggttgcggagaaaactttccggcctccctggtatcaccgcaatactatgtcagaattcatgggtttgatcaccggaaactatgatgcgaagactggtggcggcttccaacctgctggcgcgagtctgcacaacatcatgagtgcacatgggccggacatgcatgcattcgagggagcaagcaacgcggacctgaaacctacgaagattggggatggcagcatggctttcatgtttgaaagctccctcatggttggcgtgtcggagtggggtcttaagacatgccagaaggtgcaggaggagtataacgaacatagctggcagcccttgaagaggcacttcaaggatccaaggaaggcccagtga

SEQ ID NO: 28050 - DNA, 1377 bp, Emericella nidulans
tctaaccttcccgttgagcccgagttcgagcaggcctacaaggagcttgcgtcgaccctcgagaactccaccctctttgagcagcaccctgaataccgacgggctctccaggtcgtctccgttcccgagcgcgttatccagttccgtgtcgtttgggagaacgacaagggcgaggttcagatcaaccgcggttaccgtgttcagttcaactccgctctcggtccctacaagggtggtctccgtttccacccctccgtcaacctttctatcctgaagttccttggcttcgagcagatcttcaaaaatgctctcacaggactaaacatgggtggtggcaagggtggttccgacttcgaccccaagggcaagtctgactctgaaattcgtcgcttctgtaccgctttcatgactgagctctgcaagcacatcggcgcggacactgaccttcccgctggtgatatcggtgttactggccgtgaggttggtttccttttcggccagtaccgcaggatccgcaaccagtgggagggtgttctcactggcaagggtggcagctggggtggtagcttgatccgccctgaagccactggatacggtgttgtctactacgttcagcacatgatcaagcacgttaccggtggaaaggagtccttcgcaggcaagcgtgtcgccatctccggctccggtaacgttgcccagtacgccgctctcaaggtcatcgagctcggtggttccgttgtctccctttccgactccaagggctctctcattgtcaaggatgagtccgcttctttcacccctgaagagatcgccctcattgccgacctcaaggttgcccgcaagcaactctccgagctcgccacctcctccgctttcgccggcaagttcacctacatccccgatgctcgcccttggaccaacattcccggcaagttcgaggttgctctcccttctgccactcagaacgaagtctccggcgaggaagccgagcacctcatcaagtccggtgtccgctatattgctgagggttccaacatgggttgcacccaggccgccatcgacatctttgaggctcaccgcaacgccaaccccggcgatgccatctggtacgcccctggtaaagccgccaacgctggtggtgtcgccgtctctggtcttgagatggctcagaactctgctcgtctctcctggacatccgaggaggtcgatgctcgcctcaagggcatcatggaggactgcttcaagaacggtctcgagactgctcagaagttcgctactcctgccaagggcgtcctgccttccctcgtcaccggttccaacattgccggtttcaccaaggtcgccgaggccatgaaggaccagggtgactggtggtga

SEQ ID NO: 28051 - DNA, 1434 bp, Emericella nidulans
aatgaaaacgacgagaatggtccctcaacgcgtcttactcgcgccaaagccgccgccctgacaacagacgcccctgctgccaatggagccctcaagaaaccccttcagacaaagaaagccgccactggcgccaacggcacacaaagaaaacgtgctgcgcttggtgatgttagcaatgtcggaaaggcggacaatggcgagaccaaggacgcgaagaaggccacatccaagaccggccttacatcaaaagctaccatgcagtcggggggcgttcaaaagctcagccgcagcaatctatcccgtaccgccgtcggagcaaaggacaacaatgtaaagaaacctgccacagaggcaaagcgccctggaagtgggtctggtatgggaagcgcgatgaagcgcacatccagccaaaagtctctacaggaaaagaccatccaacaagaagagcctccccgcaagaaggtcgacattgaaaaggtcgtggaaaagcaggctgaggctgtctcggttaagggggatgttaaggcaggggcacaaacagaagagcttgaaaagcctcaagatttcgttgccgacctagacactgaggacctggacgaccccttgatggctgctgaatacgtggtggagatcttcgattaccttcgcgagctggagatggagacgttgccaaaccctgattacatcgatcaccagccagaccttgagtggaagatgcgcggcatcctggttgactggctcatcgaagttcacactcgcttccgtcttcttcctgaaacgcttttccttgccgtcaacattattgaccgtttcctctctgccgaagtggtcgccttggaccgtctccagttggttggtgttgctgccatgtttattgcttccaaatatgaagaagttctctccccccatgtcgccaatttcagccacgtcgccgacgaaaccttctctgataaggagatcctggatgccgaacgtcacattctggccacgcttgaatacaacatgagctatcccaatcctatgaacttcctgcgccgtatttccaaagcagacaactacgacattcaaacacgtactcttggaaagtacttgatggagattagcctgcttgatcacaggtttttgggctaccctcagagccaaatcggtgcagcagccatgtacttagctcgtctgattttagaccgtggtccttgggatgccactcttgcccattacgctggctacaccgaggaagagattgatgaagttttccggttgatggttgactacctccaccgtcccgtctgccacgaagcattttttaagaaatatgcaagcaagaagttccttaaggcctctatcatgacacggcagtgggccaaaaaataccaccatctgtacattgacagcgcgctcacagagccgtacaactccatcaaagacaacgaatag

SEQ ID NO: 28052 - DNA, 1494 bp, Emericella nidulans
gcttctgccttccgctccagcctgaagctgcgggcttcagctcgtctcccagctgttcgcactattacaaccacaccccgccttcgagctgcggagaagccttacttccccaatgagcctactgctcccaagctggctacggccattcctggcccaaagaacaaggccgctagcgaacagctcaacgaggtcttcgatgtccgcagcttgaacatgctcgccgattacaccaaatccgtcggaaactacatcgccgatctcgatgggaacatgctcctcgatgtttatgcccaaatcgcgtccattcccgttggttacaacaaccctcacctcctcaaggtggccgcttcgcccgagatggctacctccttgatcaacaggccagctcttggcaatttcccttccgctgactgggctcacatcctgaagaccggcattctgaaggtcgctcccaagggcttggaccaggtgtttaccgctatggcgggttctgacgccaacgagaccgcttataaggccgctttcatgtactaccgtcagcaacagcgtggcggtcccgagaaggaattcaccgaggaagagattcagtctagtatgctgaaccagacccccggatctcctcagctgtctatcatgtctttcaaggctggtttccacggccgtctattcggcagtctttccacgactcgcagcaagcccattcacaagctcgatatccccgcctttgactggccccaggctcccttcccctccctgaagtatcctctcgaggagcacgctaaggagaacgctgaggaggagcagcgctgcctgcaggaagccgagcgcctgatcaaggaatggcacaaccccgtcgctgctatcattgtcgagcccattcagtctgagggtggtgataaccatgcctcccccgccttcttccgcggtctccgtgaaatcactaagcgcaacaacgtcctcttcatcgtcgacgaggtccagactggtgttggtgccaccggtaaattctgggcccacgaccactggaaccttgagactcctcccgatatggtcaccttctccaagaaggctcagactgccggttactactttggcaaccctgccctgcgtcccaacaagccctaccgccagttcaacacctggatgggtgacccctctcgcgctctcatcttccgtggtatcattgaggaaattgagcgcttgtttctggttgagaacactgccgcgactggtgattacctctactctggccttgagcgcctcgcgaagcagtaccccgagcacctgcagaacctgcgtggtaagggccagggtacgtttattgcttgggatactcccaagcgtgacgagttccttgtcaagggcaagggcgttggtatcaacatcggtggtagcggacagaacgcagtccgcctgcggcctatgctgatcttccagaagcaccatgctgatatcctccttgagagcattgagaagattatcaagcaactgtag

SEQ ID NO: 28053 - DNA, 1500 bp, Emericella nidulans
gtcttgcaggatggctttcctatcccttcctatcctaacagcgctcggcgagtcgtttacgtgctcttccaactcgtgtacaacctctacttccacccactacgcgactatcccggtcctctgctatggcgagccagctctcttccttggaaactgaccctccttcgcggcacaatgcatcacgacctgatgcgccaccaccagacgtacggcgatactgtgcgcataaagcctgacgagattagctacgcaaatggccaggcctggcgcgacatccacgcccacgtacctgggcgcccagaattcctcaaagaccctgtccgcctgccactggctccaaacggggttatgagcattctcgtctctgacactcgcaaccacgcccggttccggagtctgttcggccacgcttttagtgacaaggggcttcgcgcgcaggagcccacgattgcccgctatgctgatttactggtcgaagtcctccgcgaggttgccgatactggcaagtcagtcgagatggtccgttatttcaacatggcgatctttgactccattggcgcgctctcatttggggaatccttcgacagcctcaggaaccgcgagctccacccgtgggtagacacgatccacaagaatctcaaaagtgtcgccatctcacacgttctccgcagcatgggcgtcgagttcctggccccctatctaatgccggccgagctgcgcggcaagcgacaagagaactacacatatgccatagaaaaactcaagaaacgtatgcaaaagacgggtgatcagggcgacttctgggaccgggtaatcgtcaaaagtgccgacgggaaccaatcaggagatggaatgagctatggcgagatgatcaacaacgcggcggtcatggtggtcgccgggtctgagacgacctcgtcggcgctatgcggctgcacgtatctactctgcaaatttgataagatggacaaggctgtcgccgaggttcggggcgcattcgcggccgccgaccagatcgacctggtctctgtctctcggttgccgtacctgacggccgtcatcgacgaaaccttgcgcatgtacccctcggtccctggacagccgcccagagtggtgccagagggcggagcaatagtatgcggacggttcgttcctgctgagacccgcgtcggtgtcagccacctgggcgcttactacgcgccatacaacttcagccatgcggacaagttcattcctgagcggcatctggccggtgccaagttagaggagccgttccgacacgacaactatgcggcgtaccagccgtggtctgtaggagtgcgcaactgcattggacggaacctggcctatgcagaggtcaggctgacgctggctaaactgctgtggcattttgatataagcctggacgaggagaggacggggaactttttggaccagaagatctggtcaatttgggcgaagagggagctgtatctggaaattcggaccagggaattttag

SEQ ID NO: 28054 - DNA, 1521 bp, Emericella nidulans
gacttcgccaagctgctggtagcctctcctgaggtcaaccctaacaacagaaaggccctcactattccagtcctgaacccattcaacacatatggccgagtcttcttcttctcatggtttggcttcatgcttgcattcctctcatggtatgccttcccgcctctgttgactgtcactatccgcgatgatctcgacatgtcccaaacacaaattgcaaactcaaacatcattgctttactagctacactactagttcgacttatctgcggccccctatgcgatcgtttcggacctcgactagtctttatcggcctactgctggtgggctccattcctaccgcgatggccggcctcgttacctcaccccaaggactgattgccctgcgcttcttcatcggcatcctcggcggcacattcgttccctgccaagtctggtgcacagggttttttgacaagagtatagttgggacagccaactccctagctgccggtctaggtaacgctggtggcggtatcacatacttcgtcatgccggccatcttcgactccctcatccgtgaccaaggcctccccgcacacaaggcctggcgcgtcgcctacatcgtcccctttatcttaatcgttgccgccgccctaggcatgctcttcacttgcgatgacaccccgactggaaaatggtccgagcggcacatctggatgaaggaggatacccagacagcatctaaaggcaacattgtcgaccttagctctggtgcacagtcctcccgtccctccggacccccttccattattgcgtacgccattcccgacgtcgaaaagaaaggcaccgagactccactagaacctcagtcccaggcaatcggccaattcgacgccttccgcgcaaacgccgttgcctctccctcccgcaaggaggcttttaatgttatattcagcctcgcaacgatggccgttgcagtcccctacgcctgctcctttgggtctgagctcgcaatcaactcgatcctgggcgactattatgacaagaacttcccgtacatgggccaaacgcagaccggcaagtgggccgctatgttcgggttccttaatattgtctgtcgtccggcaggtggatttctggcggatttcctttaccggaaaacgaacacgccctgggctaagaaactcctcctctcgtttttaggtgttgtcatgggtgcattcatgattgcaatgggtttctcagatccaaagtccgaagcgactatgtttggtcttactgccgggttggccttctttcttgagtcttgcaatggggcaatattttcgcttgtaccacatgttcatccttatgctaatgggatcgtctccggcatggtgggtggattcgggaacctcggcggtatcatcttcgccatcatcttccgctatagtcatcacgactacgcgcgcggcatctggattctaggtgttatttccatggccgtgtttatctctgtctcctgggttcggcctgtgccgaaaagtcagatgagggagtag

SEQ ID NO: 28055 - DNA, 1527 bp, Emericella nidulans
accatgtccaggtcctcacgatcttccgtccttgccctagctcttgccacgggttctctcgtcgccgccggtccctgcgacatctactcgtccggcggcaccccgtgtatcgcagcgcacagtaccacgcgcgccctctacagctcctacaacggcccgctgtatcaggtgcagcgcgcctcagatggtaccacgaccaccatcaccccactctctgccggcggggtcgcagacgcctcggcgcaggacgccttctgcgagaacacgacctgcctcatcaccatcatctacgaccagtcaggcaatgggaacgatctgacccaagctccgccgggtgggtttaacggccccgacgtgggcgggtacgataaccttgcgggagctatcggagcccctgttactctgaacgggaagaaggcgtatggagtgttcgtctcaccgggcactgggtacaggaataacgaggccattgggacagcgacgggtgatgagcccgagggaatgtacgctgttcttgatgggacccattataacgacgggtgctgctttgactatggcaacgcggagaccagcagtctcgataccggcaacgggcacatggaggctatctactacggcaccaacacagcctggggctatggcgcaggcaatggaccatggatcatggccgatctcgagaatggactgttctccggtcagagctctgactacaacgccggtgacccgagcatttcctaccgcttcgtcacagcgatccttaagggcggcccgaacttatgggctcttcgcggtggcaatgccgcatccggctcgctgtcgacgtactacaatggaattcgcccaaccgatgcttcaggctataaccccatgagcaaggagggtgcgatcatccttggaattggcggcgacaacagcgttagcgcgcaggggaccttctacgagggcgccatgacggacgggtatccagacgacgcaacggagaactctgtccaggctgatatcgttgcggccaaatatgctactacttcactcatcagcgggccggcgttgaccgtcggtgacacggtctcattgaaggttaccacgtccggctatgatacgcggtacatcgcccacaccggcagcaccattaacactcaggtcgtctcctcctctagctcgagtaccctgaagcagcaggctagctggaccgtccgcaccgggctggccagtactgcggccgcgaatgggtgcgttagcttcgagtccgtcgacacccccggcagctatattcgacactcgaattttgcgcttttgcttaatgcaaacgacgggaccaagctgttctctgaggacgctaccttttgtccccaggacagtttcaatgacgacgggaccaactcgatccggtcctggaactacccgacccgctattggaggcactatgagaacgtgctctatgtggcgagcaatgggggagtcaatactttcgatgccgccactgccttcactgacgatgtcagttgggtcgttgctgacggctttgcc

SEQ ID NO: 28056 - DNA, 1560 bp, Emericella nidulans
gctacgaattctttccgaaaactcactttttcaggagcctcccgtctgggtggttgtcgccgtctcccactaacctgcagacaacttcgattcgcctccgacagcggagccgcagcggcaactacaaaagcaacggccgaatcagcagccgagtcagctagtataaacgtcaaagaggcacccaaaaaggccggacggggcctgcggcgcacggtcctgggaacgtcgttggcgctgacgctgctggttggatatgtctacgggacggacacccgggcgagtgtgcatcggtacggtgttgtgccgctgattagagcattgtatcctgatgcggaagatgcgcatcatattggtgtcgatactttaaagatgctgtataagtatggtctgcatccaagggaacggggggatccggatggagatggggcgctggcgacagaggtctttgggtatacactgtcaaacccaattggcatatcgggcggcctggacaagcatgctgagatccctgatccgctgttcgcgatcggtcctgccattgtcgaagtcgggggtacgacacccttaccacaggatggtaacccgcgtcctcgcgtattccgacttccatcacagagagcgatgataaaccggtacggcctcaactccaaaggcgcagatcacatggcagctatcttggagcaacgagtacgcgattttgcctacgcaaacggatttggggcatacgatgcggctaagcagcgtgtattggacggcgaagctggtgtgccaccaggtagtcttcagcctggtaagcttttagctgtccaagtggcaaagaacaaggccactcctgacggcgacattgaagccatcaagcgcgactatgtgtattgcgtggaccgtgtggccaaatacgctgatattcttgttgtgaatgtatcgagccccaacacacccggtctccgtgaccttcaagccactgccccgctcacagctatcttgagtgctgtcgttggcgcggcaaagagcgtgaaccgcaagaccaaaccatatgttatggtcaaggtcagtccggatgaagactcagatgaacaagtctctggtatctgcgacgccgtccgagcatccggtgtcgacggagtgattgtcggaaacacaacaaaccgtcgccccgaccctataccccaaggttacactcttccggccaaggagcaggcaacgttgaaagaaaccggcgggtattcaggtccacagctgttcgatcgcacagtggcccttgtggctcggtaccgctccatgctggatgcggagtcggaaacggccggatccgccaaggattcagcagcgaccatagcgcaaacagagccaggctcggaaaacgttcctcctgtggaagcgccaagcggactgccgcgcaaagttatcttcgcttcgggtggtatcaccaacgggaagcaggctcacgctgttttagacacaggggcatctgttgccatgatgtacaccggtgtggtctatggtggcgtcggcactgtcactcgagtgaagcaagaacttcgaacggcgaaaaaggagtga

SEQ ID NO: 28057 - DNA, 1578 bp, Emericella nidulans
gccgcaagctcttccctcgaccacttgtccaaccgtatgaagctggagtggcactccaagctgaatactgagatggtgccggcgaagaacttccgccgtacatccatcatctgtaccatcggtcccaagacaaactccgttgagaaaatcaatgccctccgcagagccggtctcaatgtcgttcgcatgaacttttctcacggttcatacgagtaccaccaatcagttatcgaccacgctcgggaagccgaaaagcaggcagctggccgccccgttgccattgctctggacaccaaaggacccgagatccgtaccggaaacaccgtaggtgacaaggacatcccaatcaaggctggccatgagatgaacatcagcaccgatgagcaatatgccaccgcatccgacgaccagaacatgtatgtcgattacaagaacatcaccaaggtgatttctgccggcaagctcatctatgtcgatgacggtatcctttcatttgaggttcttgaagttgtagatgacaagaccctgcgcgtccgatgccttaacaacggcaacatctcttcccgcaagggtgtcaaccttcccggtaccgacgtagacttgcccgctctttcagagaaggacatcagcgatctgaagtttggtgtcaagaacaaggtcgacatggttttcgcttccttcatccgtcgtggcagcgacatccgccacatccgtgaggtgttgggtgaagagggccgagagattcagatcatcgccaagattgagaaccaacaaggtgtcaacaatttcgacgagattctggaagagaccgacggtgtcatggtcgcccgtggtgaccttggtatcgagatccccgctcccaaggtgttcatcgcccagaagatgatgatcgccaagtgtaacatcaagggcaagcccgtcatttgtgccactcagatgcttgagtccatgacatataaccctcgtcccactcgtgctgaggtgtccgatgtggccaacgctgttctcgacggtgccgactgtgtcatgctttctggagagactgccaagggtaactacccttgcgaggctgtcacgatgatgtctgagacctgcctcctcgccgaggttgccattcctcacttcaacgtcttcgacgagctgcgaaacctggcccctcgtcccaccgacactgttgaatccatcgccatggctgctgtgagtgccagtcttgaactgaacgccggcgccattgtggtcctcaccactagtggaaacactgcccgtatgatctccaagtaccgccccgtttgccccatcatcatggtttctcgcaaccctgctgctacaaggtactcccacctgtaccgtggtgtctggcccttctacttccccgagaagaagcccgacttcaacgtcaagatctggcaggaggatgtcgaccgtcgcctcaagtggggtatcaaccacggtctcaagctcggtatcatcaacaagggcgacaacatcgtctgtgttcagggctggcgcggcggtatgggccacactaacactgtccgtgtggtccctgctgaggagaacctcggactttctgagtaa

SEQ ID NO: 28058 - DNA, 1584 bp, Emericella nidulans
tctcaggtcgacgcccagcttaaggatgtggccatcctcggctccgtgagcaacgaagcccgcaagatcctcacaaaggaagcctgtgctttcctcgccatcttacaccgtaccttcaaccctactcgcaaggctctcctgcagcgccgcgttgatcgtcaggccgagatcgacaagggccacctccccgacttcctcccagagaccaagcacatccgcgatgatcccagctggaagggagctcccccagcgcctggtctcgtcgaccgtcgcgttgagatcactggtcctaccgaccggaagatggtcgtcaacgcactgaactcggatgtcgcccctacttgggataacatgatcaacggccagatcaacctttacgatgccatccgccgccaggtcgacttcaagcagggtcagaaggagtacaagcttcgcacagaccgaaccctgcccaccctgattgctcgtgcccgtggctggcacctcgacgagaagcacttcactgtcgatggcgagcccatctccggcagtctgttcgactttggtctgtacttcttccacaacgccaaggaattggtggctcgcgggttcggtccttacttctaccttcccaagatggagtctcacctcgaagctcgtctgtggaacgatgtcttcaacctggctcaggactacattggcatgccccgcggcaccatccgtggtaccgttctgattgaaaccatcactgctgcgtttgagatggaagagatcatctacgaactccgtgaccacagctccggtctcaactgcggccgctgggactacatcttctccttcatcaagaaattccgccaacaccccaactttgtccttcctgaccgctctgatgtcaccatgaccgtacctttcatggatgcctacgtgaagctcctcatcaagacctgtcacaagcgaggagtccacgctatgggtggaatggccgctcaaatccccattaaagacaacgccgaggccaacgacaaggccatggaaggcgtgcgcgccgataagctccgtgaagttcgtgcaggccacgacggcacatgggttgcgcacccggctctcgcttcgattgccagtgaagttttcaacaagtacatgcccacccccaatcagatgcacgtccgccgcgaggacgtcaacatcaccgccaacgacctcctcaacaccaacgttcccggaaagatcaccgaggacggtatccgcaagaacctgaacatcggtctctcctacatggagggttggcttcgtggtgtcggatgtatccctattaactacctgatggaggacgccgctaccgccgaagtctcccgcagccagctttggcaatgggcccgccacggtgttaccacctctgagggcaagaaggttgacaaggcttatgccttacgtctgctgaaggaacaggccgatgcccttgcagccaagggtcctaagggcaacaagttccagcttgctggtcgctacttttccggccaggttaccggtgaagattacgccgacttcttgaccagcctgctgtacaacgagatttcgtctccgggtactgcttcaaagctctaa

SEQ ID NO: 28059 - DNA, 1599 bp, Emericella nidulans
tccatcctcgccttggtcgaagaccgcccaactccccgcgaggtttacaactggcgcgtctacctcctggccgcagtcgcctccttcacatcatgcatgatcggctacgacagcgccttcatcggcacaacgctgtctctgcaatcctttcaaaatgaatttaattgggaatcgctcaatacggatctcatcagcgcgaatatcgtctcgctatatcaacgaggtgccttcttcggcgctcttttcgcgtaccccatcggccacttctggggccgccgttggggtcttatgttctctgctcttattttcttccttggtgccggcatgatgctcggtgcgaatggggatcgagggctagggctgatctatggtggccgagtgcttgcgggcattggcgtcggcgccgggtcgaacatctgtcctatctacatctcagaaatggcaccctccgctattcggggtcgccttgttggggtttatgagctgggttggcagattggtggcgtcgttgggttctggatcaattacggcgtggacgaaacccttgccccaagccacaaacaatggatcatcccctttgccgtgcaattgattcctgctggcctgctcattatcggcgccctcttgatccgcgaatctcctcgttggctcttcctgcgcggtaaccgtgaaaagggcattgagaccctggcctggatccgcaacctgccagccgaccatatctatatggtcgaggaaatcaacatgatcgagcagtcgctcgaacaacagcgtgtcaaaattgggcttggtttctggaaaccctttaaagcagcctggacgaacaagcgtattctctaccgcctctttttggggtctatgttgttcctctggcagaacgggtcaggcatcaatgcgatcaactattacagcccgcgcgtcttcaagagtattggcgtatcgggtggcaatacctcactcttgacaacgggcattttcggtgtcgtcacggcggtcattacctttgtttggctgttgtatttgatcgatcattttggacgacggaacttgctgcttgttggtgcggcgggcggttcagtctgcctttggattgtgggcggatacatcaagatcgcgaagccagagaacaaccccgagggaacgcagcttgatagcggtggcattgcggctatattcttcttctacctgtggacggccttctatacaccatcttggaacggcacgccttgggtcatcaactcggaaatgttcgatcccaccgtccgctcccttgcacaagcctgtgctgccgcctcaaactggctctggaactttctgatctctcgctttacgccccagatgttcacgtccatgggatacggagtctacttcttctttgcatcgttgatgatcctctcgatcgtgtttgttttcttcctcattcccgagacgaagggcgtgccgctggagagcatggagactctatttgacaagaaaccggtttggcacgcccattcgcagctaatcagggagctgagggagaatgaggaggcgttccgggcggatatgggtgcgagtgggaagggaggtgtgacgaaggagtatgtcgaggaggcttaa

SEQ ID NO: 28060 - DNA, 1608 bp, Emericella nidulans
tcttacattgaggaagaagaccagagatactgggacgaggttgctgtcaagaactggtggaaggactctcgatggaggtacaccaagcgcccttttactgctgagcagattgtggccaagcgtggaaacctgaagatcgagtacccctcaaacgtccaggcgaagaagctgtggggaatcctggagcgtaacttcaacaaggaagctagtttcacctatggctgtcttgacccgacaatggtcacccagatggccaagtacctcgacaccgtctacgtctccggctggcagagttcttctactgcctcgtccaccgatgagccctctcccgatcttgcagactaccctatgaacaccgtgccaaacaaggtcaaccacctgtggatggcccagctcttccacgaccgaaaacagcgcgaggagcgcatgactacccccaaggaccagcgtcacaaggtcaccaacgttgactaccttcgtcccatcatcgccgacgctgataccggccatggtggtcttactgctgtgatgaagctgaccaagctcttcgtcgagcgtggtgctgctggtatccacattgaggaccaggcccccggtaccaagaagtgcggtcacatggctggtaaggtgcttgtgcccatcagcgaacacatcaaccgcctggtggctatccgtgcccaggctgacatcatgggcaccgacctgcttgccattgcccgtaccgactccgaggctgctaccctcatcacatccaccattgaccaccgtgaccaccccttcatcatcggctccaccaaccccgatatccagcccctcaatgacctaatggtcatggccgaacaggccggcaagaacggcgccgagctccaggccatcgaagacgagtggcttgctaaggccggcctgaagctcttcaacgacgctgtcgttgatgccatcaacaacagcccgctccccaacaagaaggccgctattgagaagtacctcacccaatccaagggcaagtccaacctcgaggcccgcgctattgccaaggaaattgccggcacagacatctacttcgactgggaagcccctcgcactcgtgagggttactaccgttaccagggcggcacccagtgcgccatcaaccgcgctgtcgcctacgcccccttcgctgacctcatctggatggaaagcaagctccccgactacaagcaggccaaggagtttgccgacggagtccacgccgtttggcccgagcagaagctcgcttacaacctctccccatccttcaactggaagaaggccatgccccgtgacgagcaggagacctacatcaagcgtctcggcgccctcggttacgcctggcagttcatcactctcgccggtctgcacaccaccgcgctcatctccgataccttcgccaaggcctacgcgaaacagggcatgcgtgcgtacggtgagctcgtgcaggagcctgagatggctaatggagttgatgtcgtcacgcaccagaagtggtctggtgccaactatgttgataacatgcttaagatgatcactggtggtgtgagcagtacggcagcgatgggcaagggtgtgacagaggatcagttcaagtcatga

SEQ ID NO: 28061 - DNA, 1665 bp, Emericella nidulans
ttcgcccacccattcgatcattcattcaatgatctgtttaatcagtacgtcaatatggacacatcgagtaccgacgccaacaaggatgtgtcctttcctagcgagttcgaccagttattcccacttgactcgttctcaaccgactgtggcgaccagtctccggttatttccactgtacagcataacagtcagccggcgcaggactggggcaaggacctttggtctctgtcgcagaacaccggctgctctacgaatcaagacagtttttcttttcaagatagtacccaaccttcgactgctttggacttgagcattggcctcgaagccgatgcaactggacattcccaggcctctgtaccccgctcaacgccttcaactcctccagcaactcctggccccaaggtcaaaggaggtttattcaccccgaagacgatccgccatcaccgagaatctaatgatcgccgcggcctactgcgcaaacagagcttctcccctggcttgatgcgctcctcccagctccagaaaggcagctgtaggatggcctacccggaggcttgggctcaacgactgcagaattttaccatccgtagctccgacgagtgccttccattgtcgccacccccatctgatatccttgtgcagcaggagaacgttaagcacacacctgtgcagatgaggaacgcagcagaaggctttcaaggctcgacagagttgcctcagcagattgactctggttatatcacacaatctccagcgatcccgatgccgtcaccatccgccaatgcgttggcaggccagcagcagaggtatttaagccagacaggcacatctgctttaaccccgagtcctccttcggcaagagacgtattctcctcaccgcattcctcggaccctcaatcgatgccctcctggcattccgaatctctcaacacaccagcattccaatacactcctgaactcagtgaccatcaaacatggtggtcgcctatgccctctgaggtggcacagcgccatgcttcatatcagcagatgatcgcatcgccggctccacagcggccagtccaagcagctgccaaccacggagacttcctgcaaggagggcttatgatccaactagaccctacacaattcgatatatcttcatcattcccttcctctaccattccaacaaccgccaacaaccacgacaacctcgcctacaatgtcgaagcacatgcgccccaaaaatacgtcgacgcatcttctttcaacactcaggccgttccccatccctcacgatccccatccatatcaccaaaagcggacacttcaccgcggcatgggtctgcaaaccgcgatgggatggcaatgaagaacgctcctcgccgtcctcacggccgcaagttgtccggacagtcaacaagtacacccaagcctgtcaagactcctaacagtctatccacaagcccaagagggggcaaatcagtcacagtgtcgtttgtcaacttcacggcaaacgacaggcagaagattcttacgggggttgctccgagtggcagctccaagacaaaggccagacgcgaacaggaagcccgcgaccgacggcgcaagctaagcgaggctgcgctgcaggcggtgcggaaagcaggcggcgatgtagaagccctagaggctgtcctctgctag

SEQ ID NO: 28062 - DNA, 1674 bp, Emericella nidulans
tcctcagattcgactactcaggccgcttccccagccgaaggcttaaacccatctcacacatacgtccccaacaagggctatgccaacgaagacggcgccgtccccgctatggcggggcaagacctaacacctgaagacgaagattacgaaggcgatgaatactatgatgatatcttcgaggaggagctagatgaaggagacttcaactcttcaaaccctgcagacctcacaaaagcctacaatcgtcaaaggagagtcaacgagctcgcggccgatccgaacgccccaaagtggacatatcccaaaacgaacacacaaaagcctaccgtcaacacgtatgcatccgtcgatgatgagataaaatctctgactcgacatgccgctaaaatcaagcttgacaatgtgcagtccgggctggcagtacgcggtggcagcggcaccgatagggcggatagagccacctccgagcaggtgctggatccccggacgcgcatgattcttctgcaaatgattaaccgcaacattgtttctgaaattcatggatgtctgtcaaccggaaaagaggccaatgtataccacgccatgctacagcccgaggacgatttcgacgcagcgccaatccaccgtgctatcaaagtctacaagacgagcattctggttttcaaggacagagacaagtacgttactggagagttcagattccgttcagggtacaacaagagcaacaaccgagcgatggtcaagctgtgggccgagaaggaaatgcgcaacctgcggaggatatacgccgctggcattccttgccctgagcccatcaacctgcgactccatgttctagttatgggcttcgtcggaaactctaagggcattgctgccccacgcttgaaagatgttgacttcaatatttccgacccggaaagcaaatggcgtgagctctatatcgacatgctagggtatatgcgtgtgatgtaccagacttgtcacttggtccatgctgaccttagcgagtacaatactctctaccataacgataaattatacgttatcgatgtcagtcaaagtgtggagcacgatcacccgcgcagtctcgaattcctgcgtatggatataaagaacgtcagcgattttttccgccggaaaggcgtcccaaccatctccgagcgggttattttcgagttcatcatttctgccgaaggcccggccactgtgacggatgaactgcgtgatgctgtagagaagcttttctcactcgaacccgaggctgctgacgaggtcgatactgctgtcttccgtcaacagtacattccccagacactagatcaagtctacgactatgagcgtgatgcggaaaaggtaaacgctggtgaaggtgatgatcttgtgtatcgggatcttctagctcgggagaaaccctcagctcccccggacgacgaggccgagaccggctccgaagttagcggcggcgtctctattgcagagtctggctctgaagatgaggaagaacgggatcctttcgagaagaaacctccgcgaggaaagcgtttcgaggacaaagagtctaaaaaggagcataagaacaaggtaaaagaggagaagcgcgagaagcgggccaacaagatgccgaagcacctgaagaagcgtctcgtctcgtcgtcctctaggaagcgcaagtga

SEQ ID NO: 28063 - DNA, 1719 bp, Emericella nidulans
gctacacttgcagcaccaccacctccgctcggcgagtcggggaactcgaactccgtcagccggatcactcgcgagggaaagaagattacctataaattgaatattatgcagcagcccaagcgcgcgagagcttgtggtcaaggttcgaaatcgcacaccgaccgccgccctgtcgatcctccgccagtcattgaattgaacatcttcgaatcggatccccatgacgacagcaataagaccgacatcacgttcgtctacaatgccaacttcttcctcttcgccactctagaacccgagcgtccgatcgcaactggaaaactcatgacaaaccaaggctcgccggtcctgacaggcgtcccggtagctggcgtggcatacctggataaaccaaatcgagccggatacttcatcttccccgatctttcggtgcggaacgagggctcttatcggtttagcttccacctgttcgagcaaataaaggaccccaaagacgcaaccgaagggacacagcccatgccgtcgcccgtccctgggaaactgtcgtcaccgcaagaattcttggagttccggctggaggtcatctcgaacccctttatcgtctacagcgccaagaagttccctgggctgaccacgagcacccccatcagccgtatgattgcggagcagggctgccgtgtccgtatccggcgcgatgtgcggatgagacggcgcggagacaagagaacagaggactacgactatgataatgaaaggggttataacaaccggcgccctgatcaatatgcgggatcagacgcctacgccaacgctcctgaacgccctcgctcaacgagcatcagcacaaacatggacccgtactcctatccatcgcgccgtccgtcggcagtggaatatggacaaccgattgcccagccttatcagcgcccaatggcctctactcccgctccatcttctacgccgattcctgctccgatcccgatgcctggtccggttgcattgccgccttccaccccctcacctgcttctgctcacgctcccgctccgccgtccgtccctctcgctgcgcctcctccactccacacaccgtcgtatcagtcgcacttgtcattcggtgccacgcagactcagtaccccgctcctcagctttctcatatcccgcaacagacaactaccccgacacacccgtactctcctcgttcctcgatatctcacagccgaaaccaatccataagcgagtatgagccctcaatgggctatccgggttcgcagacacgactttcagcagagcgcccgagttacgggcagccatctcaaacaacatcgctaccgcctctacgccattcacttgaaccatctgtaaattctaggtcgaaaacaccatctaatatgatcacgtctcttccgccgatccagagcctctcagagctcccatcgaccacgtcccaaccgtcgagcgctattgggtctagccctgcgaatgaacctggtccccgactttgggagaccaactcgatgttgtcgaagcggacgtacgaagagtcgttcggtcatgatgaccggccgttgtacaacggaatgcggcctgatagtgaatcctatcctggaggaatgcagcgcaggccgtcctatgaaagatcttctcttctcgatggccccgaccagatggcttataagcgggccaacgggcggatggtctcaaagcctgccaccatgcgttaa

SEQ ID NO: 28064 - DNA, 1722 bp, Emericella nidulans
gctaacactcctcacggtggtgtcctcaaggacctcatcgctcgcgatgctccccgccacgaccagctcgaggccgaggccgccactcttccctccatcgtgctcactgagcgccagctgtgcgatcttgaattgatcatgaacggtggtttcagtcctcttgagggtttcatgaaccagaaggactacgacggcgtcgtcgccgagtctcgtcttgccgacggcaacctcttctctatgcccattactctggatgcttccaaggcagtcattgaacaggccggccttaagcctggctcccgtgtcaccctgcgtgacttccgtgacgaccgcaaccttgctattcttacaattgacgacatctaccgccctgacaaggagaaggaggccaagctcgtcttcggcggtgacccagagcaccccgccatcaagtacctgaacaccaaggtcgaggagtactacatcggtggaaagctcgaggcagtcaacaagcttaaccactacgattatgtcggcctccgctacacccccgcggaactccgtattcacttcgacaagctcggctggacccgagttgtcgccttccagacccgaaaccctatgcacagagctcaccgtgaattgaccgtccgtgccgctcgcgcccgccaagctaatgtccttatccaccctgtcgtcggtctcaccaagcccggtgacattgaccacttcacccgtgtccgtgcctaccaggcccttcttccccgctaccccaacggaatggcggctcttgctctcttgccccttgctatgcgcatgggcggtccccgtgaggctgtctggcacgctatcatccgtaagaaccacggtgccacccacttcattgttggccgtgaccacgccggtcctggtaagaactccaagggtcaggagttctacggcccctacgatgctcagcacgcggtcgagaagtaccgcgcggagctcggtatcgaggtcgttgaattccagcaagtcacctacctccccgacaccgatgagtacatgcccaaggacgaggttcctgcgggcaccaagaccctcgacatctccggaactgaactccgtaaccgtctccgtaccggtgctcacatccctgagtggttctcttaccccgaagttgtcaagatcctgcgcgagtctagcccccctcgcgccctccagggtttcaccatcttccttaccggttacatgaactccggcaaggacgccatcgctcgtgctctccaggtcactctcaaccagcagggtggacgctctgtcacactcctccttggtgacactgtccgccacgagctctcctctgagctgggcttcagtcgtgaggaccgccacaccaacgtccagcgcatcgctttcgtcgccggtgaactcacccgcgccggtgccgctgttatcgctgcccccattgctccctacgagcactcccgcaaggcggcccgtgaggctgtccagagcaccggtggctctttcttcctggttcacgtcaacactcccctcgaatactgtgaggccactgacaagcgcggtatctacgccaaggcccgccgcggtgaaatcaagggcttcaccggtgtcgatgacccctacgaggcccccaccaacgccaaccttgtggtcgacgtttccaagcagagcgttcgttccattgtccatgagatcatcctcatgctcgagagcgagggctactttgagcgtctgtag

SEQ ID NO: 28065 - DNA, 1770 bp, Emericella nidulans
cgcgaggtcaacttcagcatcccgaatgtcaacaaggcctcggtcaacatcaccactactctttacgaccgccgggctttagactgcacatcgacgctgcctctgatcaactccctcaaccatttagcttatctaaccacttcgtctgctcggatccgcgatattcttaccgtcgatggcggcattgaacgactggtttgtatcctcaaagagggtcggagtaacaacctgatggagatgtggaaatggagccttgctttccaatgtgtcgtcaacattggagtacggggctcggaaaatgtcagaaccagagtagtcgaggctgacatggtacctgttattgcaaccattttggacaactatatcaaagtaatggacaaagtgcgcgctcgatcggattccgaagctcaacgacacaggcaccatcaactccatcacaagataactcctacggcgagcgacagcacaagccgctcttcattttcagacgcctccagcaacgagcagcgcacctctcgccgtcaaccacctcccactcacatcgaaatccctcccttcttccatgatacccgtgcggtggaatctaatgctgctgacgtcccctctccgccgcgtgcaccaatgacttcgccgcccgagagaagcacttttggtcaggatacgtatgctcatcgatctcatgcacctctccggcacagagcaattcagcccttggcaacagctattccttcaatggacgctgctgatgggtctggactacgccctgtccgggatacggagaggcttcccagcatgcttcccgctgcttttaatgaactcgcatctcagcccgactctcccactactcccagcggcgccggacacatccgaagcaatgtacacgttcctattggaacacacgcccgcccaccactgagccagcatcaatcaacctcaggggactcagatgacgccaatggtgaagactctataatggcggatgatacagggtcgggacaatctaggaggcctattatcggtctccagagccgcatggatatcgacgatgacgccgatagacagactgtgatcgatagcgttaccgactcctcccacgatttaacagtaaccgataccacttcagatgggcaagaatcggagacattcaacattacccaccgttccgccgtcgatggcagtataatcaccaatgataacgcacaggctgtgaacaatgcgaactctccacctattgtgcccagcccctattctctttacttccgtgatcggacaaacatcgctacccagaatttcttgaatacgatgccccgcgaggaggacgtcctgatgtcgcttcagcttttggcttacgtttccaagtactgtaacctccgctcatacttccaaaactcacactttgtgccaaagctcaagatcgaccgagagcttcgaatgctggacgaaggagcctcaccagttgaactaattgaagaggaagacgagtacctacttcctgacgatgtcaacatcttccctctggtggagaagtttaccgctcgccaccattcaaaggatatgtcatactgggcttgcgtggtgatgcggaacctctgtcgtaaggacgagtcccgaggcggtattcgccagtgtgcgaattacaaatgcggtaagtgggaagagttcacacgtcaattcgccaaatgccgccgctgccgtcgcaccaagtactgcagcaaggattgccagaaagcagcgtggctctaccaccgtcactggtgcgccacgccatga

SEQ ID NO: 28066 - DNA, 1770 bp, Emericella nidulans
gccagcatgaatcaacctcaaccgtacatggatgtgcattcgcatctgtcgtcgggacagacatatgcgtcccaccctgcaactgctggagcattgacccattaccagtacccgcaacaaccccctgtgttacaaccgacgtccacatacgggccggccagctcttactcccagtatccttatcccaacagtgtagcatcatctcagtctgtcccgccgccgacgacgtcgattagcagtcaagtccctgctcaactactgcccttacctgtcaccaaccaccctgttcccacccacggatatggaaacaacagcggaacaccaatgcaagggtatgtatacgatcccactgggcagatggcgcctcccggcgctaagcctagggttaccgcgaccctgtgggaagacgaaggcagtctctgctaccaagtggaagccaagggtgtctgcgttgctcgaagagaagataatggcatgatcaacggcaccaagctgctaaacgttgcgggcatgacacgaggccgaagagacggtatcctcaagagtgaaaaggtccgaaatgtggtaaagattggcccgatgcatctgaagggcgtttggattccctttgaccgcgcgctggaattcgccaacaaggaaaagatcacagatctgttataccctttgttcgttcaacacatcagcaacctgctgtaccacccggcgaaccagaatcagaggaacatgacagtgccagattccagacgtcttgaaggcccccaacctgttgttcgcacccctcaagcacagcaaccacccagcctacaccaccattctcttcagacacccgttccttctcatatgtctcaacccggcggtcggcctagccttgaccgcgcacatacgtttcctacgccacctgccagtgcctcgagcgttcccaacacccagcctctgtcgatcgacacgagtttgagtaatgcacgatcaatgcccacaacccctgctacgacgccacctgggaacaacctgcaaggcatgcagtcctaccaaccccagtccggctacgattcgaaaccatactactcggccgccccgtccacgcacccccagtacgccccacaacaaccactgccccaacagtccatggcgcagtatggccactctatgccaacgagctcgtatcgtgacatggcgccgccctcgtcgcagcgtggatctgtcaccgagatcgaatctgatgtcaagacggagcgctacggccaaggcaccgttgcaaagaccgaaccagagcaagagcaggagtatgctcagcctgacagtggatacaacactggtcggggctcgtactacaccaccaacccctcggtcggcggtctcgcccacgaccattcccagctcacgccagacatgacgggatctccccagcagaatggttctggacgcatgacccctcgcacgagtaatactgctcctcagtgggctccgggatacaccacccctcctcgccccgccgctgccagtagtctgtacaacattgtcagtgacacgcgaggaacgtcaggcgcgaatggaagcacctctgacaactattccgtcgcgtctaactctggctactcgactggaatgaacggctccatggggtccaacaagcggatgcgtgatgatgatgacgaccgcattgtcccaccggacagccgtggtgaattcgataccaagcgccggaagaccttgacagagaccccggttgggggtccagtaggtggtgttcctcttgggctgcagcaatga

SEQ ID NO: 28067 - DNA, 1827 bp, Emericella nidulans
tacctctccacggtcctcttcccactactggctctgaaccttggtctctcacacgcgagattcgtccgtgaaactctcgagctgacatgggaatacggatcacccaacggcggtacgccgcgcgagatggtcttcacgaatggggagtatccaggtccggatctgatatttgatgaagatgatgatgtcgaggttcttgtcatcaataaccttcccttcaatacaaccgttcactggcatggtttagaaatgcgagaaacacctgaagcggacggtgtcccgggccttacgcaaacaccaatagagcccggtgcgacgttcacgtatcggttcagagcgtatccagctggtacgttctggtatcactcgcattacaaggggctcatgcaagatgggcaggtaggagcaatgtatattcgccgcaagcctgatgctttgcgaccctacgcggttataacggaagacccgagagagttagcagaaatacagtacgcagaagataatccttatttgatgcttgctacggactggacatatcttacttcggcggagtatcataacatcgaggttgagtctggctataacgtcttctgcgtggatagtctcctcatcaatggtcgaggctcagtctactgtcccggataccaataccttgaggaagtgagcgacacggccttactgtccgtcctcgaaggaacacatctgaccgagaaaggctgcctccaaccggacctacataatgtccaaggcgactacggcccctggaacctctctgctgttcccacagaagtcgtctttaattgcaccccgtccagtgtcgagcccccggtgatctacgtcgatcccgaattcaacggttgggtcagccttaatttcattggcggcgctgcgcaaaaggccataactttttctgtcgacaatcacccaatgtgggtatatgaagttgacggacagtttgttgaaccgcgtgaagtcgaaatggttggcgtatactcgggagctcggtacgccgtcatgatcaagctagaccagacaccaggcgactacgcgattcggattgccgtcaatggcgcggatcaggttatgagcgtttacgccatcctctcgtatgtcaatcaggattggatccacagggagaatgtgcccaaggccgctatcggaccgcatacagatacagtgggctacatgaactacggcggtggcaacacatctgcagatgtacgccagcttctcttcacagaaaatctgccggcctttgcggtcccgcctcccccaccttcgagcgaggtctcaacaaccctacgtaccggcatgatccgcgtaaacaactcctactcttggtcattgggaaacaacgtgctgtacgagcccgaaatgacctcctcgacaccgctcctcttcgaaccggatccgctagccgtcatcgcaccaaagtacgccctcacgacagaaaacaacacctgggtcgacattgtcctcgaaatcactgccgacccgcgcgacctcatccacccgccacatccgatccataagcacggtaacagagcatatataattggcaacggggttggcaaattcagatgggagaatgtgagtgctgcagaggcagaagtaccggatttgttttacgtcaacgagactgcggcgttgcgggatacatttgtcacggatttttttgattcgcggctcatggatggggcatggatagttattcggtattttgtgcaggacaagttcccaagtatcttgcattgtcatattgcgtcccatcaaatgggaggaatggcgctggccttgttggacggggttgatgtttgggattcttag

SEQ ID NO: 28068 - DNA, 1974 bp, Emericella nidulans
tctggttaccagagaaccccacaagcggccgtgctagattgtgattctgcccaatctctgcaggatggcgctgcttattctacttacggccagccggtttatatgtcgactccccttgccccatctccaatgaccgaccatataagccagatgtccgattgcatgccatacatggcgaagcctgagtacgctagctcctacgaggatgagaagtcgccaatgattactgtggaaccttgccagttgcccgaagtcacttcatactcaccccagcgaggatccgaaggaacgagggtttttgtgcagctgcagtcaccctacgacctccacacaaccccctatgcaacactctacatcgtgttcggatcaaaaaagtgcgagtgcaatccgcactttctcggattccgggactctgccttccaatatgctctctccgtcgacacgccgccatttatgtctacggggtcgccctccctggctgttcctctgcaactagcgatgggcggtcaaaatgaaagccctgccacaactctgcaggtgggcgtttatacatatgagaatgcaggacagcagtcgccctctgaagatggccggaagaggcgaatttcttccttctctgcagatagtacctccaggccgattaagcgggcgtcaacccttccggtgcagatcaaggaggaacaatctagctacgctgcgccttactcgccatatctgcagccacttccttccatgaacggatttgccgcctcgtatcacacggattcttcgccccggatgggtgctacacaatatacaaccgtatcgacaaactcgcagccttcgattcgtgccccgtctcccatggccccgtcgccaatggcaccttcgtggaactcgtctttcctctcggtcaaccatgatcagagaggttccgggtatgcagtcggccgtggcgtttgccagccaaagccctcgtcacctgcgagcttttcgaacccaactctcatccgtacctccacattgcagcagtcggctggtgtcgtccaaacacaatcgttcaacccctatgccatgtatccgtcaaaggcagtattgaagctcaatggtgacctaaataccatgacgcataattggactcgggaggagcaagttgctcagcgccgcctggttcaatttacacgaatgcaaagtggcagcactattcacgctgatttcaagcctgtgtctcccgaagagcgggctccgaacagcatttgtatcagctgcatttattgggaaggcaaggatgagtgtttcatcacgagtgtggacactatctatctacttgagtcgctcgttggagtccgttttacggtggaggagaagaatcgtattcgacgaaacctggaaggctttagacctttaactgtgtccaaatccaaagcagacagcgaagagttcttcaaggttatcatgggattccctgccccgaagccgagaaacattgaaaaggatgtcaaagtctttccttggaagattttaggccatgctttgaaaaagatcatcggcaaatattctgcaagctattcatctaccgctggggctctgcccacacccattgggtccaactacccaagtactggccccgcatctgactctggcgcagaaggtcaaagcgctgcctctccccagtcgatatccgaagggacgccctcgagcagctatcaccagagcaatgcagtcccaatttactcgcccccgactgaaactgacggaccaattcgaacaattctacccgccgtcagccagtcatactcaaatatgactgcaccgtactcttatactacggtctgccactcaggtcaggttgcacccagcggccctgcagcgaggagttgggagctcaaccagcttgccactccttcaaccatgaatggacacccgaatcctggcaatttcaattacatgcctccgatgacttattctcagtctgattacccccagggacactag

SEQ ID NO: 28069 - DNA, 2163 bp, Emericella nidulans
ccaacttccatatctaccgctcccctcagccaaggatcccctccctcttctctcattgattatcagcctcagtccgtcccttcttcttcttcccctcctccttctacagctgctgctgctgctgctgcggttgtcgtcgctgttccttcgtcttcctccccggtcgaccttggcctcccgtctttcacctccacctcgtcccttatcacgtccgacgtccccgccaccacaaccacacccagttttactggttcggttatcggctccatttcacgtcggaatcgacgctcttttgctgctctcgctcgagaaaagacttctagcgctctcgcaaatctctcgtcaatcggctcgaccacgaattcctccctccggcagtccgcctcatccgggagtctacagaagcattcgcgcaaggcttcgcaactgagtgtgggcgaaatctcaggctttgttccactctccccgccattgtccgacggtagcggcagcagcgagcaatcgagctctgccccgttcgaacctttatcagcggtcactgagcagcccaaccctgccgcagaacggcgccgccagaccatccagcttgtaccgcccatctctgagaacatacctgtttctcccgccaaaatgcatcaaacctcgtcaaggctgttgcgcatgacggaggatgatcgtcctttcaccaaggatttcatggatcttttctctactcttatggtcagcttgaaactggattcgcatcgcgttcgctttacgaaatatgaccacactttcacatcggaggaagccattaacaatctgggctccctcaaattctctcaatcgaaccggatgccagacccgaaagacccctcccgcattgtaaccactactacaacaactaccttctcaatggcgaaagaaatggctcgatcggtatgtcagcggtttgtggatgctcgcttcattgagtctgtggatgggaaatactcgcacacgtttccgctgaagggcgctttatatcaacttactccgaaaggtatcaacattttgcagaggttctgtcagagaaacggcatcactgcgcgccatgttattgacgtcctggagtcgccccgcaacactatgcaactcgtcaacttggagcgcgataccgaaaccgacaagctctcccacgaccgagcgacgatcgaagtcatcttccgtcgattcgcagggcaggacggccctaatgtgaagagcagtgtctcgagctcggattcagattccctcagcgactactcaaatggtctggttggagtaaagatggctcgggagcgcaaagtcggcgacaaaatttgcgccaatactttcactgggaaggctgcggttgactggctgatggactgttcgacaaccattgagccccgggagacggttctgatcgcggaactttttgttaagtatggattgatcaccgtacttcaggaggaccggtcaatgccgcaggtcgagaactcactagttgctttccaaccctcgaagaacgcgatctacgccatcactgagcgtggccagcgggtttgcggatggctcgctcgcgacaagcctcgcgacacgacgacctatgacagccgtggcatcccacgggattcgaataacgcacgcttgaaccatatcttgcaagaccctgccctacgcctactattccgagaatttctccgtttctcactctgcgaagaaaacctgtcattctacattgacgtctccgagttcaccacccagtatcataaattcgacaaggtgggccacttcaagaagcccgacgctgtacgggaaacgcttgcggcagcatatggcctttacaatgcgttcctagcacccgggtctccctgcgagctcaacattgaccacgcgctccgtaacagtctggccagtcgcatgacgaaagctgttggcgacgacgactcaatgctcaagagtctccaagaagtagtccagctgtttgagatggcacaaacatcggtattcaagcttatgtcaagcgattctgttcccaaattcctgcgggatccgaaatactccgcaatcctccaggagcacgacgttgatgacctgatcggtggtggaagatcttactcgcctacgcctggaaacgtcccggaacgatcgatgagtcgctcacaacgttcatgacagtaa

SEQ ID NO: 28070 - DNA, 2217 bp, Emericella nidulans
gctgctgttatcacgctccagtcgtcctcgacggctggtctccaacagggctctccatctgaccgtcatctccttcggccgctgctgcagaataaccctcagcaaccgccgctacagcagcagccgcttcaaccacagcaatccccctctcctgcccccattggcacccttcctcgtcttcctgcactgggccgggatggaccgagttgtgacgcctgtctgcgcagaaagagtcggtgtgctatgaacgaaatggtcaacaagtgttattcgtgcgactttcatcgccaggactgcaccttcaccctatcatcatcgtcaaccaccacaacaaccattaccacgaccgcgaccagcgcgaacagcgcgaacagcgccagcagtgccagcactgccggcaccagccgtccaagcacggctgacgtgcagtctaaaaagcgtaaactggacgatatcatcaatagtgatgcggattctcctaaaaggttatcgaccgtttctaaagctgacagtgctcgttcgcccttgagtgaacacccgcggttcaacgccgtctcatactggcatcagaccacccagcacatcggcctcactaccgagctggagcccgccctactggcctaccttccggtagaccagaacgacgagagtatcgttgctgcttcgcgggtacggaaactcagcgacgacggcacttttatgcgtgtcgtcaacaccatgtcgcatgcggatgctccgcagtccgccaccctggtctccatcgagagcctggttgctccctatgggtccaccttggtagagaagttcttcgagcacatccacccgaccttcccaattctgatggaagatgtcttccgccagtcgtacagaaccaggaatggcatctctccacttttactttctgctgtctacgtcctggccctcaagtttgttgacatcggaccagcctcgcagtccgcgcggcggcccgacgccactcgtcttgaggccactgctttgaggcttcttaatgaatctctaccatatgcatcaatatcgacgatccaagcggggctgttactcatgcaaaagtcgacgttggcaaccgctgctttgaacgcgcaattggtcaccgctgggtttgagctcgggcttcaccaggattgctccgactggcggatggaaacctgggagaagggcctgagaaagcgtctcgcctgggcactttacatgcaggacaaatggtccgcaatggtgcacggccggccatcacatgtcgtttcctccaactggactgtgcaggatctcgtggaagaagattttactgacgcgttcgcctcgaccgcatcccagccggaagacgcccctgtaggccacgggccgcttttcttctgtcatctagtggccctgaccaccattctctccgatatcctggaccgcttttacaccctccagtcaatacaagaatttaaagccgcgggcagcaaccgaacccgtctcatcctagaacgcgccaaaccggcccaaatccgtctcaaggaatggttcgcgcgtctacctgcatccctcaaactagactctaccaccgacctctttgagaacatcacggaggaaaatgcccgcaacggcgccctgcacctctcctacttcgccaccgaaatcactctccatcgctgcatcgtccgctccctctctccagattccacggacgcctacctctcccacatctgccgctccgccgcaaagacccgcctcatctcagcaatggactttgtaaaccgtctccgcccgcctcaccttcgctccttctggcccgccgcatccagaacccactttgccctcatcggctcgttcggcatcctcctacgtgtaacagcgccgaccaaagaagaagccgagttctaccgccttcggctctgcgagtaccgctggaccctgagcgtcagcaaaaaggacgccgaattcctcgagtttgcgctcgagtctctagacaacgcaacggatctagatcatcatgtccctgctaaaccaggaatcgatgagctgatgaccagctcgtcaaaaccatacattgcttctacttcggccagatcggggacgacgcaggaagaggcgattctggatttggacccgcgctctgggaccggaggcacctcctctgttatctcggggctggcttcaccggctacctcggttagtgaggaaagtatgcacgatgcggctgttgctccgatgtaa

SEQ ID NO: 28071 - DNA, 2232 bp, Emericella nidulans
gctactagtatcaccgccggcctacaaaaggcccagcaagcagtgcaggacactgccaccaagaacaagaagattgtcgatattagccacgacacagtaaatgtccacacagaccaggagcagcgaacagattttggtgtcgcgatcaccgaccctgatcactggctgcgcgtcaccaacgagacgcactcgggcccctcgctgctagaagaccacatcgcgcgagagcgcatccatcgtttcgaccacgagcgcatccctgagcgcgttgttcatgcccgtggaacgggcgcctacggcaatttcaccctcaaggagagcatcgaagatttgacctatgctggagtgttaacggatacttcgcgcaacaccccggtgttcgtgcgtttctctactgtccagggcagccgggggagtgctgataccgttcgcgatgttcgcgggttcgctgtcaagttctacactgacgagggaaattgggatattgtcggcaacaacatccccgtcttcttcattcaggatgccatcaagttccctgactttgtccacgctgtcaagcccgagcctcacaacgaagtgccccaggcccagacggcccataacaatttctgggactttgtgtacttgcaccccgaagccacgcacatgttcatgtgggcgatgtctgaccgcgccatcccgcggtcctaccgtatgatgcagggtttcggtgttaacacgttctcgctggtcaacaaggagggtaagcgccactttgtcaaattccactggatccctcacctcggagtgcactcgctcgtctgggacgaggccctgaagctggcgggacaggatcccgacttccaccgcaaggacctgatggaggccatcgataacaaggcctatcccaagtgggactttgccatccaggccatccccgaggaggaccaggacaagttcgagtttgacatcttcgatgccaccaaggtctggccggaagagcaggtgcccctgcgtgtggtcggcgagctcgaactgaaccgcaacatcgacgagttcttccccgagactgaacaggtcgccttctgcactagccatatcgtgcctggtatcgacttctctgacgacccgcttctccagggccgcaacttctcatatcaggatacacaaattagtcgtctgggtgtgaactgggaagaaatacccatcaaccgacctgtctgcccgttcctcaaccataaccgggacggagctaaacgccaccgcatcaccaagggcacggtgaactattggcccaaccgcttcgaggccaaccctccagctagcgacaagggcttcaagtcgcacccagccccgattacaggccgcaagcgccgcgatctcacacccaagttcaaggaataccacaaccaggcgcagcttttctataactccctctccgaagtcgagaaggtgcacgtcaagaaggccttttccttcgagcttgaccactgtgacgacccgatcgtttacgagcggctcgcaggccagcgcctcgcagagatcgatctccccctggctcaagccgtggccgagatggtcggcgcgcccatccccacgaaggcactgcgtgataaccacggcaagacctccgtccgtctctcccagttcgacttcactcctaaggctcctggcattatcagccgtcgcattgccatcatcatcggtgacggctacgacaagatcgccttcaatggcatgaaggccgctattctcgccgctgcaagcgctccccttcgtcattggcaccaaacgtccgccatctacgcacagggcgaggataagaatagctctaagggtgtgattcccgaccacatgtatgacggcatgcgctccaccatgttcgacgcgaccttcatccccggcggctcgcacattgagactctccaaaagaacggccagattcggtactggattgccgagacattcgggcacctcaaggcgctcggtgccatgggcgaagccgcgcagctggtcaaggaagttctgggcaatgtgatgggcgtccaaattgccggtgcggactctgctgagcccgtcgaatggtatggtgttgttacagctcgtggaccagagagcgccgagagcctcagtgagggcttcaaggtgctcaaggacgccggtgatttcacaagcaagttcttttaccagatcagtcagcaccgcaactggcagcgtgagttggatggattggcttcgacggttgcgttctaa

SEQ ID NO: 28072 - DNA, 2244 bp, Emericella nidulans
gacgactcggcactaccttcaaacacctcgaacgggattaacggtcgcaccgcccatcgacggtccagttccggtggtgatccttttcaacacccagatatctactatggaaaccccgagtctgttgaacggatcaagaaccgccgacgtgcgttctcttcgagcttgaaatcgttcaaccggcaagacttccatgaaatgctgggtgaccgtaatacgagacgtggtagcatggacccaacgtctggcaaccccaggaaattccttatcgatgtcgacgctactcttcatagtctgcttgagagagaggattcggacaggaacatgcagatcaccatcgaggatgttggccctaaggtgcggacagctgcatcccatggttacaacaggttcgacgtgcgaggcacatatatgctgtcgaacctcctccaagaattaacaattgctaaagattatgggcgtaaacagattgtccttgatgaggaacgtctttccgagaatcctgtctctcggctttcccgacttatcaagaactctttctggaactctctaactagaagaattgacgggcgtaatatcgaggtggctggaagggatcccaaggattggactgacgatcctcggccgcgtatttatgttccacccggtgctcccgaacagttggagtactacaggagaatcgcggaagagaagcctgaactgcgtcttgatgttcaggaattggctgcggaaatcacaccggaatatgtgcgagacttgaatgagaagcccgggctgctcgcattggccatggaggagaaatacgatgaaaagaccgggaagaccgacttcgctggagttcccttcgtggtcccaggagggcgattcaacgagctttacgggtgggatagctacatggaatcgctggggcttctggctagcaacagggtcgaccttgccaaagccatggtgataaatttctgcttctgcattaagcattatggaaagattctcaacgccaaccggtcgtactatctgacacgatcccaaccacctttcctaactgatatggctttacgtgtgtacgaccgcatccagaatgaaccaggcgccatggatttccttcgccacgcaattctagcagccatcaaggagtactacagtgtttggatggctgagccgcgtctagaccctgtgtcgggcctgtcaagataccgctcaccgggtattggagtacctcctgagacggaggcctctcacttcctccatcttctcaccccgtatgccgagaaacatggtatggaattcaaagagtttgtccaggcctacaactacggcaaagtcaaggagccggaactggacgaatacttcatgcacgacagagctgttagagaatctggacacgacaccagttaccgtttggagagagtctgcggcaatcttgccactgttgacctgaactctctcttatacaagtatgaggtcgatattgcgcgagtaatacgcgtctacttcaaggacaagctcgagattccggtcgagttccgaacaccagccaccaaggatatccaaagcgaatcatcatctgtgtgggaccgccgggcgcgcagaagaaagatgaggatggacacctacctctgggatgaagaaaagggaatgtactttgattacgacacggtcaaacaagaacggaccaactatgagagcgccacgactctctgggcaatgtgggctgggcttgtcacgccacgccaggcttctgcaatgatcaccaaggcacttccccgcttcgaggagtttggtggaattgtctcgggcactgaagagtctcgtggtgctgttggactaaaccgacctactcggcagtgggattacccatacggatgggcgccgcagcagatgctcgcgtggaccgggttcgcccgttacggatatcaggaagaggccgagcgacttgcatacaagtggctctacatgatcactaaggcgttcgttgacttcaacggcgtcgtcgtcgagaaatacgatgtgacccgacccattgaccctcaccgcgttgatgccgagtatggcaaccagggcgtcgacttcaagggcgcccctcgcgaagggttcggttgggtcaatgcaagctacgtttacggcctggaaatgctcaacgcccatcagcgacgtgctcttggtgcggtcactccatgggagacgtacagcaaggctgtttctgcgcagggtagtgacaccgttcttgaaaacagatctgagtga

SEQ ID NO: 28073 - DNA, 2295 bp, Emericella nidulans
tcctccacagcgcatccgacgaaccttgcaccctcaggaaatggctcagctgcctgcgtccactgtcatcgtcgtaaagtacgatgcgacgctcgtctggtagggctaccatgtagcaattgtcgttcggcggggaagaccgactgtcaaatccatgaaaaaaagaaaaaactggcggtgcgctcgatactggacccagttccgatccgttgtcggccccctaaccctgaagaagcgccgaagccgatatcttcgctatcaccgtcatcagagcctcccaatgctttcacaactgcactccgcgctgttcagtcggatatcacagctccgtctggggttgcgaaccgtgtcgcacatatccgaagccgtagttctcagtacgataccaaaggtaccagatccaataataactcgggtaacaatactcaatatcaaaatgttctgccggagccggattccccgccctatagccgccccgcggcctcagatccgtcggagggagagtcgcgtgcggatattgagaaacggttggtgaatctgattgacggggaagcttcggatagtcgggcgattcaaagaggtgtacgagcaatatacgttgggcacgagctctcgaatatgtctttcttgatccgccaacaacgtgacacgggtgacgatgtataccacttcgcgggaaacgagatacctcggcggcagctacgaactggccatgatcagctactcatggatgctctcacgttacctgagcctgcccttgccgatgagctcgtgcatgcatatttcgcacaagtcaatccaggctacccgattgttgaagaggagttgtttatgtctcaataccgtaaccgagacccggccgatgcccctccgattctcctccttcaaactattctgcttgtcggcgcccatgtcactcgtccgaagtccgaacgcgatacactaaaagacatttttttccgccgtgccaaatggctgttcgacaacaggattgaacggaatcgtgacatcctggttcaggccgcgctcctattgacatggcactcagacctagctgacgacgacgtgtctgccaatgcacattattggattggaatagcggctaggattgccactggactaggaatgcaccgtaatccagtttgcacgctcaacctcgaggattctgatgtctctccgttgacattttcagattttgagggctgcggtgcccgtgtacaggctgattttgtcatccacttttctgagttatgcacgatgatctcttacattgttcgggaacgttttggacttagaatcagcgctgaacgccgcaaggctgcgctccttgaggctgacgaagcccttgcaaactggtcactgagacttccagatagactacgtttgagggcgtcagatatggacccctggtctgccatgcttcatctcacttacaataatttcctaattcttctccatcgacctcatccaagagcttcagcgtactcggatgactatggtccccacgacgccgaaatctgcagcgcagcagctggagtgatagcctcgatttttgaagagcttcgtatacacgatcgactcaagctcctctggtattctggcgtacacactctattcaccgcaatgattcaagtacgggtcgagctccgattttccaacccggttcttgcaatcaatgcccttcgtcgctttgactctgcttcatattccctccgcgagctcgcccagtattggtctcatgccagcaccatcctacgattatttgaggaatcgagacgcctccaggaagatctgcgaactacaaccagtgacagaccccgtcgattcagcaatctcagcaataactctacaaacagccctgcctctcagcagaagaacacctcaggcattcctcacttggcaaatatcaactcatctgatgctacaccacccagcgcccctagcataccccctctacaaccaagcagtcagctatcctacgaagtcccaacaaccgaatctgctcaccataatccacgctcgcaacccacgttaagtgctcatactcacacctatacaacccaaccgtttgacacctggattccatctaacaacctgacacctatggacacagtcgataattcacgcgaaatgcttgactggcgccagctgttttccttcaccgatctggagggaccagtccttccttcaactatggaagggataaccgagctggaagacgagtggcgccagatttactggcaagaaacgccgatgtcggatctcttgcaggatggtgggtggatgcatgggtaa

SEQ ID NO: 28074 - DNA, 2310 bp, Emericella nidulans
gagaatgtacaatcgagaatgcagggatcgcgcatccccggactcaaagagatgaacccatcagggacaaatgctcgctcaaggctgccgcagccaggcgcaattgcgaacaaacccactgcagtgcctcaactggcccgtacgaggagcactacggaaagcacaaggataggcgcaggtcccccgtccgcagcacggtccgtcaatggagctacaaaagcccatacccgcgccaactcgtacgcaaattcctccaccctgacccgatcagcttcggccgcttcacgacccagagggcccctttcatcgtcgaccagcggccgacccaagacttcaatgagcacctcccggcggccgaacggacacgcccttccacgaccggcaacatccctagatacgcatcaggaggagcgcagctatggaggacttggaaaacgcggcgagtgggatcaagatgagcgggaacagaatctggagagtctttttgagaccttcgtatctcgtattagccaacaagggcaggagagctcaggcctcaaggatgcgctcgaagtttacaaatcaagagttggtgagcttgaagaagcaaagagcgaacagacggaacagaacatacgcctcaaggtggaactggatgtcagcaaatcacgcctcgcggaggcagaggatgccctgaaaaatgcccagcgagatcatgaaatcgcgatagatgagctcatgtctcggcagcgcgcggagtgtgaatctgtgagatatgagagccagaagagcttagacgcccttaaggcacaacacgaatccgaacttaaggagctaagaagacaatttgaacgtgagctggaagatgagaaatgtgcgcgggtccgggaattgaaccagcttcactcaaagactgctctcgacgcccagctatcgcagatcgaacttgataagacaataaaggaactcgcggcaactcgggaggatctccaatcgctgcggaccgaactcgatcgggaacgaaagaacaccaataacctcagacagaacctggataccgccgcttctaacagcgttacattggagtccaccattagtgcgcttaaggcaaggatcgagttcctagagtcaggaagggaagaacaatctgaagcttttgaacggttgaaccagcaaatgatggatgctatggcggagaccaatgcagccaaagagaaactcagaagggaagaaacactccggcgcaaattacacaatcaggtgcaggagctcaagggcaacatccgcgtattctgccgtgtccgacctacgttagaaaatgaaggtgcatcggacgcggctcaattcacatatccggacgagggtgaagactccaaagaaatcaatattatcggaccagaggagaagagcagttttggaacagtgacgaggaagaaccacaatttctcctttgaccatgtcttcgggccgtcagcccaaaacagcgatgttttcgacgaaatcagccagcttgtgcaaagtgccctcgatgggtacaatgtttgtattttctgctacggtcagactggtagcggcaagactcacacaatgtcctcgctagacggcatgattcccagggcagtacatcaaatttacgagacagccacgagcctcgaggaaaagggctggagatacacaatggaaggcaactttgtggaagtttacaatgaaaatttgaacgaccttttgggtaaagccgaggagttggacaagaagaagcttgaaatccgacacgacatgcagaggggcaagacgaccatcacggacgccaccactgtgcaactcgaatcgccagagatggtcgaatctcttctcaaaagagcggcagccaaccgatcagtagcggctacgaaggcgaacgaacgctcctcccgctcccactcaatcttcattctcaaattgatcggagaaaactatataaccggtgaacgcagtgaaggaaccttgaacttggtagacttggccggttctgagagattaagccacagcggtgcgacaggagaccgactgaaggaaacgcaaaatatcaaccgcagtctaagctgcctgggggatgtaattgcagctttgggacagggcaagaaagatggccatatcccataccgaaacagcaagttgacatatctactccaattctcgctgggtgggaattcgaagactctcatgtttgtcatggtcagcccattacaagcccatctctccgagactttgacgagtctaaaattcgccacgaaggtacacaacactcacattggaaccgcgaagaaacagacccgtgtccgtgatgtttag

SEQ ID NO: 28075 - DNA, 2325 bp, Emericella nidulans
cagtcgcgtttagtgtcgcaaagcggcctcggtcgccgctgggcagtgctgcgatgcgcgctgtcaaagacctaccaacgacgaacactcacttccaccagacgccaattccaagacgtttttcagtcgcaacttgaagatcctacctcagctgcgctattttctgctttgaactcttcaaaagccgtaccccaaacgcttaccgaaaagatcgtacagaagtactctgtgggattgccacagggcaagttcgtcaagtctggcgactatgttactatccaaccccaccgttgcatgacacatgacaacagttggccatgcgcattgaagtttatgtccattggtgcttctcgtttgcataacccggatcagattgtgatgactctcgaccatgatgtgcagaataagtctgacaagaacttgaaaaaatatcggcaaatcgaggaattcgccactcagcacggcgtggaattttaccccgctggtagaggtattggccatcagatcatgatcgaagagggatttgcctggcctggtactcttgctgtcgcgagtgactcgcacagtaacatgtacggtggtgttgggtgtctgggcactccaatcgtgagaactgacgcggctagtgtttgggcgactggtaaaacctggtggcagattccccctgtggcgaaggtgacgttcaagggcgtcttaccaccaggtgtgaccggtaaagatgttattgtcgccctttgtggtctgttcaacaaggacgatgttttgaatcatgcgattgaattcactggatctgaggagacaatgcgaagcctctcagtggatactcggttgaccatcgccaacatgacaactgagtggggggctttgtctggactcttccccattgacagcgtgctgaaggggtggctgaggggcaaggccacgacggcagccatggggcttgcggacggccctttcaagacccgggctgctgagcgattcacgcacccgctcctagagcagctgttcgagaatccgttgactgctgataaaggcgccaaatatgccaaggagctgttcctggacctttcaagcctttctccttacgtctctggacccaactcagtcaaggtggctactcctcttaaagagcttgaggcccagaacatcaaagtggacaaagcataccttgtctcctgcacaaactctcgagcctcagatattgctgccgctgcgaaggttttcaaggaggctgccgaaaagaacggcggcaagatccccaaaatccacggcgtcaagttttacatcgcggctgcgtcaattccggagcagttagcagccgagggaaatggtgattggcagacgttacttgaagctggagcaacgcagctgcccgctgggtgtggaccctgcatcggtatgggccagggtctgctggaacctggcgaagtcggtattagtgcttcgaaccgtaacttcaagggtcgcatgggtagtactgaggcgaaggcgtatctgggaagcccggaggtcgtcgctgccagcgcgctgagcggaaagctcagtgggcccggctggtaccaaacccctgaaggctggacagaagtgattcgcggtgaaggagacggcatccgcgaagaggatcgaatgctgacgaacgaagaagctctggagaagataattggtcagctggatgaccttgtggccgatggtgagaagcgttttgcttcggagaccccagcagttgaggaatccgagcaaggcctgacagagatctaccccggatttcccgaacgcgtctctggagaacttgtcttctgcgacgccgataatgtcaacacagatgggatctaccctggaaagtacacctatcaagacgacgtgccccctgagactatggcccgcgtctgcatggagaattacgatccagaattctcgaccactgctaaggaaggggatatcctggtaagcggtttcaacttcggctgtggcagctctcgagagcaagctgccactgctatcttggcgaagaagattcctttggttgtatcaggcagctttggaaacattttctcccgtaacagtattaacaatgctctgatgggcctcgaggtcccacggctggtcaaccgccttcgtgagacatttggatctggcgacaaggttctcactcgccgtactggctggactctgacctgggacgtgcggaagagccagatcgaggttcaggaaggcccgggcggacccaagtggacgcacaaggttggagagctaccaccaaacgtccaggagatcattgccaagggcggtttggagaaatgggttaagaacgccattggtgcttga

SEQ ID NO: 28076 - DNA, 2325 bp, Emericella nidulans
gttagggcgacgtgttcatgtgtcatgtccgtcaatcctctctccgcccaaacctctgcttcgccgctcagtcggaatcggtcctctcttctgtccaaattccggacgcagctcggtcagcgcaatcgcgctataactgatttctatattgagcccgatgacccttggcgttcctattttcccggcgatgttataaaagggacggtgtctctcacggtcgttcggcctgttcgcataacacatttggttatctctttgcacggcattgtcaaagtcttcaagaacaatgttccagctggtgaaactcccccggatgtggggtccttgggtcctgggcgcgggcgccgaggcgctgagtatttgggtaacggcgtcgcaacattgtttgaagatgaggtggtactttgtggggaaggtcgtctcaaggaagggatttacaagtttcgttttgagatgtcctttccaccatacccattacctagcagcatcagcttcgagaggggcaccatttcttacatgcttacgtccaccttgaccaaacctacaactatgaacccgacattatcatgccgaagacgcataaacttactggaaaacattgatattgcggcctttccggcgcccaagcctcgagtggtaactcttgaacctatttccaagcgctcgaagccgaaaggaaagaccaaggcggcaggattcgatgctcctgacacggcctcattagagccatcggcaagtggaggaatcactgtcccagagcatcgccctccgctcagtccggcacctagcaatgttagctcgtctagtcgcctcagcaacagcagccagagttttcagatcgtgacggatccagggtcgaccgctagtagcggtgttcgcaatagcgaagcccggagcaacacgccttctgtgaccgatggaataatcaccgccaaggctgaagttctgcgcgctggcgtgctacccggtgacacattgcccataaagataaccattaaccacacaaaacaagtgcgcagcgcgcatgggatcatcataactctctatcgatccggccgtatcgaccttcaccctgctatcccgatgggatctaccgcgaatggaaagaagccaatctacgaagactattatccccgttctagaactggcctggggggtcttacccttggtacttcccgtgccagcagcgtatttcggaaagatctgtcacagacctttgcgcctctcattgtggatccgacgactttgacagctgatatcaagacttcaatccgcatacctgaagatgctttcccgacaattacccgcacaccaggtagcatgatcaacttccgttattatgttgaagtggttgtcgatctgcgcggcaagctgacttctccggagcgttttcttccgcggtttaacctagtttcttcagggcgcaacttctcctcaaatgggaagattgtgcaccctgccgatacgaatggaagcgcgatcacagccaactggggtgacaacattctagacacggatcaaatacgtcgtgaaaagggagttgttgctgtgattttcgaggtggtcattgggacccaagatacacagaggcgcaagagtgaagcccggcgcatgtcatctacggcggaggaagcagagttccagcagcccgtagaaaactccgttgatggagattacgctggccacgactaccagggcagcatggcgggcccagagcccggctatgctccgctagagaacactgcatatggacctgatcaaattcgttggccagattatccagagcagtcggagcatgagcattatcctttccagccggggacgcttcccagtcctcagccggatgagcctatggacgaaaaggcacgattacggcgtgctgaacagacgctcttgcctagtcaacctccgtgcgacccggaggccgggccctcatcagcggtggaagctgcaatgcctaccgctcctgtgctccctgaagatgaccacttgaacgattatcaccaccttccgtcaacaactgtgaatggtatgactggaatggcgccagcactcatgtcagcggagtctgtgcaaacagtcattgcaggaagcagttccgcacctctcactagtccctcaagacccagtgaagaggataaacaggagttggagcgccagcggttaatgatggaagccagtgcgccaggtgacccggatgcacgtcataacgaccgcgcggatgatgggcctagtgcgcccattttccatgacgatgacgatgatcagcagctagttggaggggctgcaaatggggacgagctattaccgcggtatcaacgttga

SEQ ID NO: 28077 - DNA, 2388 bp, Emericella nidulans
gctactgactggcaacccgagtgtatggtatcccaaaaccaagcagctctggagagcataggagcccattcagaccgagctcttcagaatacgtctgggaacgtgcaggcatactcagacagcctagcacaccatgacacgactggacgtgatgaccctctacagcattacaccctcaagtaccctcaccctccagtcccagtcccaagccatccactgccaactgccactgccaatctctaccatccccagcttttaagtcatcgataccaggtcaagaagctgcggcgtctccaatcgaatggttcctcatatgcagggtccagaagggggagaagttacttgaagtcacagaagtacttagagtatagggctcggccacgtcgggatactgggaaagatggtgaaccagtatggtcggacgaactggaggatgccttccagcaagctcttgaagcaaacccgcctatggggagacgaaagtggtccgaacgtggaaagtcctacggacgaaacgaactgattgcggagtacatctataaattgactgggaagcgaaggaccaggaaacaagtgtccagtcacttgcaagtacttgactcattcctcaagggtgaccctgattgggagagacttgtccgagaacaatcagatcgttcaactgcccagacgcaaccggtgggaccacgatggagaacctcgatggaccatttgccgtcgagtcactacggcactcacgcaacctcttcttacccggaacccatgaggctgatgcccccttactcggcagacttgcagctacctcagtactcacccacttcaactcaacaagacacaaacaacaacacaatacaaggccttagctttgacatgtgggtcagcgctccaaacaaaccggaccgtattgacgacgcgtaccatttgtatacccgcctccaaggcgaccaacgtcaaccgcccatgccgctggaagatctgaagaactggcgcgtgtcctttccccacctaagctcatcactctcagacgtgaacgatccgctgaactgcgaaataattcttctcgagaccaacctcgagctgatggatgactttcctcctatgggttctagattggggatccacctggaacttgacattgcaaatcctatgtctgggacggcgccaacggtcaaccagatggagaattggacatgtagtacttacatatacgaagacgggaggcgcacgatggaggcatatcacaacctcaccaagccgcatacaacaaaggttaagccgccatttgagtcatcgtggtgggcaaaaaccttcacgaaactgacacaagacaagcgggaagctgagagcaccggacatcaccacgctgctgatgagcgtacccgacggtattttcactctttgaccgcggtgcaggagatccgggctactgtacctccaagcttgcgacgtctacagaaccattatccaggttctcctgctgaagaaagcaagcggatggccatcatcctctggaagttccgccagactcgacccaacgaggttggcacgacgacatggcgaaagctgataacgtctccggaccgtgccttgaccaatagccctagaccgtccactgcaattgatcttcctcctctatccttagactctatcctgctaagcaagcctacttcgaacttataccaggcaccgcctcagcaccatgacctactgcaccagaatgccccctcgcagcagtcttggtccctctatcaaccatctcatgaccatgttaatagcttataccactccgccggcgccttcgattttctaaacagcatcacaaaaccggaagaggggttatcagataagacagccccaacctcagtgcttgaccccttccccaacctcacacaacagactactagccaaacggccggcatcaacgtttccagcggcacaccggtaatgcttcagatccctgatttatccctctcgtccaaccttggaacctatggactcggccatgaaagccactatgtgccgtcacaccataatgcagcaaatctgcacgatcacagcagcaccaccggactaggtcactacttcgccccaagcacccagtcactcgacgaaattagccattcccacgccccatggtcagctccaaacacaacaatctccggcgatactagcggcggcaactaccatcatctaccgtttacgacgtcagatcactccgttacggtatcgcgcgagtcgcaccagaatcacagctttgaggggctactgccttcggatgatctcgttggaatcgttgggggattatctggtgatcctaatatgaacggggcgggccccgaacatacatcttcggcatatgctgaacatactgcggttgaggctgtctag

SEQ ID NO: 28078 - DNA, 2406 bp, Emericella nidulans
aggtctctcatctctgtggccgttctgtcggctctggcagccttctctcaagcgaacaccagctacacagactacaatgtcgaagccaaccccgacctcttcccgctatgccttcagcatctcaacgcgtccttcccggactgcgccacgggcccgctcagtttgacccccgtctgcgaccgctcgttgagccctaaggaccgcgcgacagcgctcgtctcgctcttcaccttcgatgaactcgtcaacaacaccggtaatacaggtcttggcgtttcacggcttggactgcccaactaccaggtctggggtgaggcgctccatggcgttggaagggctaactttgtcgaatccggcaatttcagctgggcgacgtcattccccatgccaatcacgatgatggcggccctgaataagaccctgatccatcagatcgggaccattgtctccacgcagctgcgcgcattcagtaacgccggactcggcggagtagacgtctactcccccaacatcaacactttccgacacccggtctggggccgcgggcaggagacgcctggtgaagacgcatttcttacttcggtctatgggtacgagtacattaccgcgttgcagggagccgttgacccggagacgtccaagatcatcgcaacagcgaaacactacgcgggctacgatattgagagctggaataaccactcgcgtcttggaaacgacatgcagatcacccagcaggagctgtcggagtactatactccgccctttattgttgcctcgcgcgacgctaaggtccgcagcgtgatgtgttcctacaatgctgtgaacggggtgccgagctgcgccaataaattcttccttcagactttgttgagggatacatttgagtttagcgaagacgggtacgtctccggtgactgcggtgctgtctacaacgtgtggaaccctcatgggtatgcgagcaacgaggcggctgcgtccgcggattcgattcttgccggcacagacatcgactgtggaacttcataccagtggcactctgaggatgcattcgaggacagtctcgtctcgcgatcggacattgagcgcggcgttatccgcctctacagcaacctcgtgcaagctgggtactttgacggcgaagacgcgccataccgcgatattacatgggacgacgtcctcagcaccgacgcctggaacatcgcgtacgaggcagccgtcgagggaatcgtcctgcttaagaatgatgagacgctccccctttccaaggacatcaagagcgtcgcggtgatcggtccttgggcgaacgtcaccgaggaactccagggcaactattttggcccagcgccctacctcattagcccactgactggcttccgcgactctggtctggacgtccactacgcgctcggcaccaacctgacctcgcactcgacatccggtttcgaagaggcgctcaccgcagctaagcaagccgacgcaatcatctttgctggcggaattgacaacacaatcgaagccgaagccatggaccgcgagaatatcacttggcctgggaaccagctcgacctaatcagcaagctcagcgagctcggcaagccgcttgtcgtcctgcaaatgggcggtggtcaggttgattcatcctccctaaaagacaacgacaacgtcaacgcactcatctggggcggataccccggccagtcgggtgggcatgcactcgccgatatcattaccggcaagcgcgcgcctgctggccgcctcgtgacaacgcaatatcctgctgaatatgcagaagtgttcccggccatcgatatgaacctgaggccgaatgagactagcgggaaccctgggcagacgtacatgtggtacactgggactccagtctatgagttcggacacggccttttctatacaactttcgaggagtcgacggagacaacagatgcgggatctttcaacattcagacagtccttacgacgccgcactcgggatacgagcacgctcagcagaagacactcctaaacttcaccgcgacggtcaagaacactggcgagcgtgagtccgactacacggcactagtctacgttaacaccaccgctggtccggcgccgtatcccaagaagtgggttgttgggttcgaccggctcggaggattggaaccgggtgactcgcagaccctgacggtccctgtgacggttgagagcgtcgccaggacagacgagcagggaaacagggtgttgtatcctggctcttatgacgtggcgctgaacaacgagcgctctgttgttgtgaagtttgagctgaaaggcgaggaggcggttattctgagttggccggaggatacgacctcggactttgtttctagcattgacggaggccttgacaggaagcaggatgttattgcttag

SEQ ID NO: 28079 - DNA, 2418 bp, Emericella nidulans
actccgtccacatcacatatttcgagccagctaaggcagctgatatattaccatcttgacaacaaccttgctcggaacgcgctgttccttgccggtcgtttacacgcctacgaacctcggacgtcggaagcttcgtacctattagctctgtgttacctacaaaatggtcaggtgaaagcagcatgggaaactagcaagcattttgggtcgaggggtgcgcatcttggatgttcttacgtctacgcgcaggcttgtcttgacctcgggaaatatacggacggtattaacgcgctagagcgaagtaagggacaatggacttcgcgaaaccactggaataaacacagtgagacgcgacgacaacacttgccggatgctgcggcagttttatgtttgcaaggaaaattatggcaggcacacaaggaacacaacaaggctgtggagtgttacgctgcagctttaaagctgaatcccttcatgtgggatgcattcttgaatctgtgcgaaactggtgttgatttgcgtgtttcaaacatatataagatgagcccggaattgtacagcatggtatcgtctgctgcgctcgaagatgttgaatcccaggttctacctccggacggtccactccagacacaagttaacccaaatccgagcttggacccgttcactgccggtacgactcgcagcgattcgacctctactcacgggagctcagctttgtgggaaaagttgaatggaagcacagttagtgtggcatcttcaggaacaggaccgcatcttccgcgggaaggcatggagactcctggtggccaaagtagcgaatctgatgatccacgtgtaaccaacggtaatggcacagatgtttttgagccgccgctagcccctgcaaagaagaatcgaacgatccaaacaataggcggcgatcatccgatggatcccccgccaaagatgcggccaaccggtattcgaccgaggacccgaaccaaattcgagtcagatgaaggtcatactgagagagacgcgggcatgggtcacaggttaggcgatcggaaacgaacggtctctggacaagttgcgcatccgtcggtaccgcattcaaccgaccaaggtgtcgggcaacggcgaagtgtacgtctctttaaccagataaagccatcaacgaacaaaatatctagcacggcattaggagtgaaagagggccgggaggtgaaaaaggtgagaactacggggaataaggcgcgcacaacaacaagctcaaatgtgggccgtgttgttagcggcaacaatcgacgacacgctggggagatccatgacggagacagcaaagaataccgtggaacatcttcaacatcaaatggctctcagaacgcatcgtctaagctcgctatatctgagcggaccaaatcggttgaagccttggcttggattttggacttgtttttcaagatagcctccggctatttctgtctcagccggtacaaatgctccgatgctatccagattttcagctctctatcccagggccaacgggagacaccgtgggttcttgctcaaattggacgagcttactacgagcaagcaatgtatacagaggccgagaaatactttgtccgggtgaaggccatggcgccttcccggttagaagatatggagatctactcgacggttctttggcatttgaagaatgatgtcgaacttgcttacctggcccatgagttaatggatgtcgatcgcttatcaccagaagcttggtgtgctgtcggtaactcgttctcacaccagcgggaccacgatcaagctctgaagtgcttcaagcgtgccactcaattggatcctcatttcgcgtatgggttcacgctacagggccatgagtatgttgccaacgaggaatatgacaaggcattggatgcctatagaagcggcatcaacgcggacagtcgacattataatgcctggtacgggctgggaacggtctacgataagatgggcaaacttgactttgctgaacagcacttccgtaatgcggccaagattaatccttctaatgctgttttaatatgctgcattggcttggtcttagagaagatgaacaatccgaagtcagcgttgatccagtacaacagggcctgcaccctcgcgcctcattctgttcttgctcgattccgaaaagcccgtgcgttgatgaaattgcaggatctcaagtcagcgcttacggagctgaaggttctgaaggacatggcgccggatgaggcaaacgttcattacctcctgggcaaactgtataagatgcttcgtgacaagggaaatgccattaagcacttcacaactgcattaaaccttgatcccaaggcggcgcagtacatcaaagatgcaatggaagcccttgacgacgatgaagaggatgaagaagatatggcgtga

SEQ ID NO: 28080 - DNA, 2454 bp, Emericella nidulans
gacgaggccccatcaacacccgccgtgggcaaccagaaacgaccccgcgtttcggaggagaaccgcaaaagagcggtgcgcgcctgcgacggctgtcgtcgcgtcaaggagaaatgcgaagggggcgtcccctgccgccggtgcactcgatatcgccgccaatgcgtctttacacacccagaccaagcagacaggctctcgcgctcatcgtccatctcactcctagaacgaaccgccgcgcgcagccgccatgacatgctcgagtcggagaggatccggtgcatggaacggatcttacagcactacgtaccgaacatttctttcgatatacagtcgctccggaaaacagcggaggagctgaagagtaaacaccgtggttcagactcggatggaggaccttcggtcgtctttgacaacgaggatatggaggatttggcgatcgaggacgaggactttacaataaaggctttgccggataatacgacgcaatattccggcgaattctcctatctgaatttctcaatgaagattaagaagaagattgatgagtggatgaaagccgagtccccagaggcatctaccgaagcagagccttttgaagagcgatggcgcgcaacgcaattacagtctggcgccgtggtagccgcttcggttacaagtctaccgccacggttcgtggccgacttcttagtgcagatgtttttcaagtacgcgcaaacaaacaacttctacgtcgaagaggactggctcaaagataagctcaacacttgttacgtgaatccagggagtctcggatgcaacgatgccggcgcggtgtgctctatcctgatggtcctagcgattggaacacagttcgcacacatggaatcggcaaccccggtaaaccacttaactagcgaagctgaccatttctcggaagacgaggttgggttgacgttctaccaatttgcatccaaattgcttcctgacattattgcctccgcctctattcgaagcgttcaggcctgcctgttgattgggacatatctattgccgctcgatacgtcaggtctttgctacacttattttggccttgccttgaaaatggcgatccagaacggtatgcatcggaagtacagcggcgaggggctaccgccccatgtgatcgagattcggaatagggtattttggacagcatataccatcgagaaacgagtcagcattctccatggcagaccggtatctctgtcagatacggatgtagacgctgcaatgcctgtcgatttccctggattgatgccgcacggccaagtttctaaccataccaatatggtaacattgataaaattgaccctcaaacttggggaggtctcaaatgagatatgcgccctccggaaatgccgcaaaaaccaacaacaagactgccttgaacgactcctcaccctccgcaaacatctggtcgactggtggaacaccctccctgaagaaactgactgccgagacctaaacccaaacggcccgcttttcagagcaaacgttcacctaaagctggactactgtctaacacgaatcttccttggtcgtccctttctcttcagcagtatgaagggcttttcctctgccaccttccagatctcgccagtaaaggcgcccatgtcctccggtgtctccaagaaccgctcaacccttgtcacggactgcgtcgaggccgctcttgaaatcattgatctttgccggttacttcgagatgaaacgggtcttgcccgtgcctctttcacagagtttagctcatgccgcgccgcactattggtcattcttgcgcagagcttgacaaagcgtacagaacgactccgggaagcgctgcagaagggcatggggcttattaagattatgtccatgggtgtcgggtcggccaggtctgcggttagtgttattgaggcacttgagagggctatctcccgtcttgaagagtatagtcgttcgcagggcgccggacagtcgggaagtcatgagtctgcctacgaccgctttaagaattgggaaatgctttggaagactggtcctgtgtctccggatgcgcacactcttacgaacgcgaacacacataccaacattttccaaagtcaagggcaggggcaagacggttaccagtctggcggtagcggagttcaaccacacttggccagtcttactccaacctcaagccttatgaactctcagagccagttacacaacgagaacgcagctgtcccgcatcacgatatcacctcgccgtcggatttcttgacaccccatgcgttctcgcaaatgccgcacattgggctcgatcatttcgtctccaacctgcctcaggaactaggtgaattcacggctattccgtgctttgagacagagggacaaacgggacccagctcgggagcgggaccgggtctcccaggagagttggatatgaaagaggggtggatgacgttttag

SEQ ID NO: 28081 - DNA, 2475 bp, Emericella nidulans
agtagcgatacccgccaaacctccggtggtaacgccaggtcgaaacggcgattaaccgatgcggtcgacgaggatggcagaccgaccgccacggccgaagatcctacgtctaatccaaaacgccaacgagtctctcgagcctgcgatagctgcagatcgaagaaggataaatgcgacggagctcaaccaatatgctcgacgtgcgcctctctttcgcgaccatgtacctacagagccaatccgaagaagcgcggcctcccgactggatacattcgcacgttggagttgctatgggggcttgtgttcaataagatacagggcagtgaggaggtcgtccggacattattgagggcggcaaatattcccagccacctggcaaccatggggaaagagtcggaggggtctgatacactgctctcgtcttggaaaaacagcattgtcttgaaagagattgaacgtctcttgacgtttctcgagcaaccggaaggggaccaagaaagaagcgcgagaggagaaatcgattccccagcggatgctgaagaaagcagtgtgctttctccggagacgcttgagtggcagcttccagattctatcgcggttgcgagtcaaagcccgttagcgtctgggccatccccagtgaggctgcctaggccatccacaacccgtctcgtcagggactctggcacgcaaacgattcccctaggagaaatcgaagaccttaccactaacggatcatcccacgatcggcctgtgatcgcttccaattctgcccgagaagaacaccgcttgcctcctaacccttggcctttacttgatatatacttttcctacacgcaatgttggttcccaatattagaaaaacacgatattcttcgaacagctttccgccaaggtgacgatgaccaatacaactctccatccgccgcaggggacaacgcggccttgtgggctgttctagcacttgcctcaatccaacaaacctcaatatccactacgcgccagttatcagacttaccagaggaccgacctgatcctgatcaactatatgccaaagcacggagtcttatcccaacagagagtgggacctaccagctcggccatattcaagcgctcttaatcctgtcattgataaagcttggccagcaggactgcgcagcagcgtggatgcttgtaggacaggctgttaggtctgcccagagtctagggttaaatgatccttccgatgctacgggagtagagaagaccgctggacggtccaaacatgtttttctagggtgctttgtgctggagactctagttgctgctaaattaggcctgttgccttccgtgcgcaagactgacttgacaaaggttgggttaataaatgaagatggtttggaagaatggcacccttgggaagaccagactggacttcgcccgatagaatcatcccgctctttccaacgcgggcccctccatgctctcagcactttcaaccgtctgctctcgctaatgtgcattctgaatgagttatgttgcgtgaggcaaacaccagcgaattccatgtcatatctagggactcttgagcgacaactgcagctttgggtctcggcacttcctacaagttatcggatagacctgcagacagtctcgaccaagccggcatcaccccacatattcggcctagagatgatgtacgaggccgttgcaaccgctataagcttacagctggcagtccagaaaaacgaaagaaacggattacgacgtgcttcggaaggctccaagcggttggtctcactacttcaagcctacatggagacctatagcctttctgctacctgcccgactttcggtatagctctgactttaggccttccacttccctgcatgaagaaaactgccccatggccctttgaggcttctcatggcatcaaccacaaactccaatcgttttctgcccatctcgcaacggtttggatccataatactggctcgcagagaagaccgagacacgctacacagcaaggtacccatccaaggagtccgatggccataagcctgcccggaaacaatatgcgtttgacgaacttaatcgaagaatctcgaactgggaatctttcaaccactgactcatatctttcgccaacttggatgcggacttcgaacgatgaaaacgctgtattatctctaccgacgccagcatcgtctcttaatatcgcgtctggagttgaaacgaaccctacttcgcagcaaatcacccatcaacatcgctcttcggtcgttggaaagcctaactcagcactgataatgtccgacctgacgacgccttttcctgcgtccggtcatcactatcaacaaacgtatgatgatgccagtttgcacttcaattctttagccgacatccagagcactagctcagcacaacgaccaaggattgctcctgacctcgatgccttgtttgacgagttggcctcgcttgatgggacagataggtaa

SEQ ID NO: 28082 - DNA, 2592 bp, Emericella nidulans
tgctggaaccccgcatgctccaggcctcattccccagatttcgactccatggctgacagcatccagaccgcacgtttttggacttctgataccatctatacagatatcactgtcgatattctcctgcacacagcatggcagatacgcgccgacgccagaatcatagctgcgatccctgtcgcaagggcaagcgacgctgtgatgccccgaaacgaggccaatgaaaacggctgggtttcgtgttcaaattgcaagcgttggaacaaggattgtaccttcaattggctctcatcccaacgctccaaggcaaaaggggctgcacctagagcgagaacaaagaaagccaggaccgcaacaaccaccagtgaaccatcaacttcagctgcaacaatccctacaccggaaagtgacaatcacgatgcgcctccagtcataaactctcacgacgcgctcccgagctggactcaggggctactctcccaccccggcgaccttttcgatttcagccactctgctattcccgcaaatgcagaagatgcggccaacgtgcagtcagacgcaccttttccgtgggatctagccatccccggtgatttcagcatgggccaacagctcgagaaacctctcagtccgctcagttttcaagcagtccttcttccgccccatagcccgaacacggatgacctcattcgcgagctggaagagcagactacggatccggactcggttaccgatactaatagtgtacaacaggtcgctcaagatggatcgctatggtctgatcggcagtcgccgctactgcctgagaacagtctgtgcatggcctcagacagcacagcacggcgatatgcccgttccacaatgacgaagaatctgatgcgaatctaccacgatagtatggagaatgcactgtcctgctggctgacagagcacaattgtccatactccgaccagatcagctacctgccgcccaagcagcgggcggaatggggcccgaactggtcaaacaggatgtgcatccgggtgtgccggctagatcgcgtatctacctcattacgcgggcgcgccctgagtgcggaagaggacaaagccgcagcccgagccctgcatctggcgatcgtagcttttgcgtcgcaatggacgcagcatgcgcagaggggggctgggctaaatgttcctgcagacatagccgccgatgagaggtccatccggaggaacgcctggaatgaagcacgccatgccttgcagcacacgacagggattccatcattccgggttatatttgcgaatatcatcttttctctcacgcagagtgtgctggatgatgatgagcagcacggtatgggtgcacgtctagacaagctactcgaaaatgacggtgcgcccgtgttcctggaaaccgcgaaccgtcagctttatacattccgacataagtttgcacgaatgcaacgccgcggtaaggctttcaacaggctcccgggaggatctgtcgcatcgacattcgccggtattttcgagacaccgacgccgtcgtctgaaagcccacagcttgacccggttgtggccagtgaggagcatcgcagtacattaagccttatgttctggctagggatcatgttcgatacactaagcgctgcaatgtaccagcgaccactcgtggtgtcagatgaggatagccagatatcatcggcatctccaccaaggcgcggcgctgaaacgccgatcaacctagactgctgggagcccccgagacaggtcccgagcaatcaagaaaagagcgacgtatggggcgacctcttcctccgcacctcggactctctcccagatcacgaatcccacacacaaatctctcagccagcggctcgatggccctgcacctacgaacaggccgccgccgctctctcctctgcaacgcccgtcaaagtcctcctctaccgccgcgtcacgcagctccaaaccctcctctatcgcggcgccagccctgcccgccttgaagcggccatccagagaacgctctacgtttataatcactggacagcgaagtaccaaccatttatgcaggactgcgttgctaaccacgagctcctcccttcgcgcatccagtcttggtacgtcattctagacggtcactggcatctagccgcgatgttgctagcggacgttttggagagcatcgaccgcgattcgtactctgatatcaaccacatcgaccttgtaacaaagctaaggctcgataatgcactagcagttagtgcccttgcgcgctcttcactccgaggccaggagctggacccgggcaaagcatctccgatgtatcgccatttccatgattctctgaccgaggtggcattcctggtagaaccgtggaccgtcgttcttattcactcgtttgccaaagctgcgtatatcttgctggactgtttagatctggacggccaaggaaatgcactagcggggtacctgcagctgcggcaaaattgcaactactgcattcgggcgctgcaatttctgggcaggaagtcggatatggcggcgctggttgcgaaggatttagagagaggtttgaatgggaaagttgacagctttttgtag

SEQ ID NO: 28083 - DNA, 2595 bp, Emericella nidulans
gccactctctcttcactccgtcatctcatccaaacacatccactcatcgacaaccatgctcacaacctcctctctcagtcagcggcctgcaaatatgccaaatatccctttgagcagatcatatctgaggcgcaaggagttgctctagcaaacgccccttcaacgctatcctttcaccgcgcggccagccagctcgctaccctataccaaagctcgtcatccgactgggacagcgtccgcgctgctcgagaccagtcagtccagcgtgactatgagggtctaattcgcaaatgcttggagggaacacaagtacttcttcttgacgatcttttaacggaaaatgacgttgaactttttgactggcatgatcgcttcaccgcatcagccactaagcgcattgtccgtatcgaagctctggccgccagtgtcctgtcacagattgtccacggagggcccgttccccaggattcttctgacctctcagctttccaaaccctttgggagtcgttctcgcggaacttcagcgctctggtctccgatgccattgccgaccccgctgtggtggggttcaagtcggtgatatgttaccgcactgggttagatgtccagccaaccgatgaccgtgatacagaacgattaatccggtcctttgctcgtacaatctcgcaagcggccgtctccaccccccgggtagaggataagccactgaacgactggctggtgcgccaaacactcaatttacttaaggcagccaaggttactcaaccaaacaaacccttgcagctgcatactggtttgggagataacgacatcaatctgctgaaatccaaccctgctcatctgcaatctcttattgcgcaataccctgaagtcgactttgttttgctgcattcatcttacccatatacacgcgaggctggatatctggcctgcgtctaccctaatgtttatttggatctcggggaggtctttcccatggtcagccgggacgcgcaggaatcgatcttgagagagagtctagaaattgtccccagcactcggttgttatggagtaccgatgggcattttttcccagaaacattttggctggccaatagacagttccgagatgcgctggaaaaggttttcgtggactatgtccagaatggtgattataccattgagcaagccatgcaggccgcagcagatatccttttccacaattcaaaccggctttatgagttaaatgaacaaccgccatctgccgctttatcgtctgggcaccagacggtctcccgtatctcgtcaactgatctgcttgagaagttcattcgaagcaacccaggcgtcaaatatgtctggacgcaattcattgactacactgccacagttagagtccgcatgttcccagtaatggagttcgccaagatcgtccgcaagcaacgccggctcggtattagtatggccaccttctggatgttgcaagacgatgaagttgttggcggctcgactacgggccaattctaccttataccagacctatccacactcagcccaaatgttggaatcgactccaagagtgccaccgtgatgacctggtggaagagcgaacaaggcgagtccttggaggaatgtccgcgcacgaatttgctcaacataaacaacaaactcaaagacgagtttggtattcaagctacctgcggctttgagattgaagtcgttttcttgaagccaaccaccgacccatcaacaggagaggaagactgggctccttctgtgaccaaccattcctggtctcaaatgactcgcgagacgcgccgcatgctccccctactcgaagaaatcgccgaaacgctcgcctccatcggcatccatcttcaacaattccatgccgagtccgcccctggccaattcgaattcatcctcccacctgacaatcccgtcgctgcagtcgacaccctcatcaaatcccgacaagtcatagccaacattgtcgagaaacacggcctccgcgcaacactctatccacggccttatccatccgccgccggcacggcgtcccacgcgcacgtttccatctccccttcaacaaaagaagaatcattcctggccggtgtgcttcagcactacccagccgtactggcattcaccctttccggcgacgcaagctacgaccgcgttaagtcgggtatttgggccggaagcgaatgggtcacctggggcacccagaaccgtgaggcgcctattcgcaagatctcaccaggccattgggaaatcaagtctcttgacggcttggcaaacatgtatttggccatggctgctttcctggctgcgggatatacgggagtaaaagaaaatctcccgctcactatcaaggattgtccatatgacgcggcatcgctcccagaaagcgaacgcgccgcactcggcataactacgaaactccccaacaccctcgctaaaagtcttgccgcgttagaatctgacgagattcttaggagtcttctgggcgagaacctggttgaagactacatcatcgtgaaacgagctgagagcaagaaactcagtgccatggatgaaaaggcgcgcaggaagtggcttgtggagaggtattga

SEQ ID NO: 28084 - DNA, 2601 bp, Emericella nidulans
ccaggaattctccccatgaaagtgatcaaggtcggcaataacacgcagagtcgtattgcccaagcctgtgaccggtgtcgaagcaaaaagatccgctgcgacggtattcgcccatgctgcacacaatgtgccaacgtcggcttcgagtgcaaaaccagcgataaactcagtcgacgagcgtttccccgtggatacacagagtctctggaagaacgagtacggacactagaagctgaggtcagggaacttaagagtctcctggatgagaaggatgagaagattgatgtgctctctcggatacactctttctcctcaccttcacagcagaagactcctgctgctgtgcactctccgactcagcctcccccggctgctccaacgagtgtgcctacccccagtgagggagccgttcatgttccggatccggttgctttgagcagcacagaggagtccggggtttcgaacacccgtggctttgctgctgtcttcaccaacatgcttgcagaccaaggccggctagctccagaaacttccactaaagctttgtctgcttctcctactcctattactccttctcgtctcgaccagcctctgaaaacaacgcctcggcttgtatcggatcagcttatcaacattttctttcaagaatgggcacctctttacccggttgtccaccgacctaccatcctcaaggcatacgagcaatacctttccaattccgaacacattcaaggcaacaaacatgagatggcccagctgaatctgatctttgctgttgctgcactcggcgctatttcgagaaccaaccaggaccctaccctctttgaggagaattggtcttctattcttgagtcgttacatgccgacatttctatcccaaccttgcagtgttacgtgttggcacaaatgtattgcttgaccaagggtgactacacaaatgttctgcgctatcgtggtgtagctgttggcgtctgccaccaattgaaactacagaagagtcagaaggctttctcatcgaacgctcttcttgctgagaccaggaagaaagttttttggtgccaatatgttctggatcgtctttgcgcttctttgactggtcttcctgttcttcttcgcgaagagcacatccagactgagtatcccgaagatatcgatgatgagaacgtgacggaaaccggtttcttgcccaccttgcccggcgagtccacacgtatctccagcgccctcgccctgttttccgcatctagagttctgaacagcacgttggagaatatctacccgtctgacggtgcatacgaaatcccattgtcaaaaatgcgtttcgttacggaacagctcgataaatgggtcaagagcctacccgctcatcttcacttggagttcacacaggataagccgagcaccaacgtcattagcagtcggtctccacttttgtctgtgatgtattatttcattcgttctctcatccaccgtcctgccgtctgctttggtgacgatcacgttcgttcaccttcagtccttgcgattgcggattccggcaagcatatcatccaaattctccaactgcttgacgagaggcgcctatgtctctctcttagcatcaaccgaagagagctcatcagctccgcagggcttgggcttctctggcaaaatgtcggcctgaagcgtgatagcaaacttgtcaaagaaagtcaaaaggtgcttacaggcgttattgatcagcttgagtctgaatcatccgtggctgcgaccgagttcagtgctctagccggtgccctcgtttcattagataccaaacgaccaacgaccaccaaccctcaacaaatgagcccacccgcccaaaaacccttgaagtctccgaggagacagctggaggcatggaaggcccgcttgatcggcagcactagcccgggtcaatctcagccaaaaccggagcctctgtcacgcagaaacaccttttctggttcgagccctggtttagcggagcgccaattacgttctcctagttgggctagcctacctcccaacgacttcccgcaccatgccccgatgagcaagaacgtttacaaccaccctatggggtatgaaggcaatccgtccatgtcctgctcggtaccgacggaccatccagctccaccatcaggaaatctaacggtctcggactgggagttcgtggtgagcgatatggatcaaggctactcgaatatattcacaggaatctatggtggcaaagaatgcggcgaagatcacggcccttttgcgtctttgactgctgagtacatgcacaaacaaggacccggcctgccgccttctttaacttcaagcgatgaattgcaaggcctgtctccggaggcttggtctgccactagcagtagcgatatggctcaacctccagaacttgcagcacagagtgtctattcggacgggagtctgggaagcagagaccacagcttgtcacttccaagtactatgccttttccgatggaggataggccgggtagcctcttggatccacttcaaggcgttattatccctgctggagacgacgatattgaagaatttgggctggtcaacggttgggatcgacggctggccgtctag

SEQ ID NO: 28085 - DNA, 2613 bp, Emericella nidulans
agctcttcagatgatgataccccactcgtcaaaatgaacggtagatcctctggtggtcaatcggacgtgaaggtgaacggcgcagcggacaccaacggtcacgtcgatcccggtgtctctatcagatttgggccggtgcagaaagatgaggacgttgaaatgaatgatgcgaacggcgccagtgcgagcaagaggaaggcgcgatcaagtgccaatcaggcgcaatcatacgcggagcccgaaagcagtgaggaggacgaacctctgagcaagcgtcgacgcacttcggtgaaacacgaggatccggagactgacgacgatgtaccacttgcacttaatgggcggaagcttcccaaggcttcggaaacagcaatcggcgaagaatccgactctgatgttccaattgaaaggaaattagctgccgaaaaaaagaaaattcaagtcaagggagaaaaggacgcggatccatctgcacaggccaccaagtcagcggcttctggaaaaaagcaagcgaatggagtgaagaaagaacctgcctctgctaagcaaaacctgaagcaagtaaaggccgagccaaagtcagcgcagtcaaccccagcaaagaagaacgcgaaggctacggcattgaagaaggaggaaagcgaagaagctgaagagccagaggaagaagaatacaagtggtgggagggtccaaccaagggcgatggaacaatcaaatggaccactcttgagcacaacggcgtagttttcccgcccccgtatgaaccgcttcccaaacacgtcaaaatgaaatatgacggcattcctgtcgaccttcaccctgaagcagaagaagtggccggcttttttggcagtatgttaaactcgactcagcatactgaaaaccccacgtttcagaagaacttctttgcagattttaaggaaatcctcaaaaagactggtggcgcgaaagatcagaagggtaacaaggtcgatatcaaggagttctcgaaatgcgattcccagccaatcttccaatactacgatgcacaacgtcaggagaaaaaggcgctgccacccgctgagaagaaacgtctgaaggccgagaaggatgcacaggaggctccctacatgtactgcatgtgggatggtcgcaaacaaaaagtcggcaacttccgagtcgagcctccttcccttttccgcggtcgtggtgagcaccctaagacaggtcgcgtaaaggctcgagttcagcccgagcagatcaccataaacatcggcaaagaggcgcgcgttccccctccacccgaaggccacaagtggaaagaggtgaagcatgaccaggaaggcacctggctagccatgtggcaggagaacatcaatggcaattacaaatacgtcatgcttgcggctaattccgacgttaagggtcagagtgactacaagaaatttgagaaagcccgcgaactcaagaaacatattgctcggattcgcaaggattatcagaagaatctaaagcacgagttgatggtagagcgacaaaaggccaccgccgtttaccttattgaccagtttgctcttcgtgctggcaatgagaagggcgaagacgaggctgaaacggtcggctgctgctctttgaaatatgagaatgtcacgctcaaacctccgaacaaggtgatattcgattttctcggtaaggacagcattaggttttacgacgaggtcgaagtcgatccccaagtcttcaaaaacctgaaaatcttcaagaagcctcccaagaaggaaggtgacgagatttttgatcggttaacaacatctgcgctaaataaacatctctcccaatatatgccaggcttaaccgccaaggtgttccgtacctacaacgcttctcacacaatgtccgaactcctcaagtcaatgcatgctaccggtaacaatgcagaaaaggttaaggcatataacgacgcgaaccgaaaggttgccattctatgtaatcacaagcgcacagttggcgcagtcacgcgcgaccaaatggagaagatgagcgagcgaatcaaggggcagcggtaccagaaatggcgtcttaagcagatgatgctcgacctcgatccgtccttaaagaaaaagaagggtgcccagttctttgaattggatgaagacatcgataaggagtggattaaggaacaccaggctttcttgattgaggagcaagcacagaagatcaagaaaaagttcgaaaaggataacgaaaaacttttggcagaaggtgagaaagagatgaaggcgagtgagctcgaaacccggttggaggcggtcaaggaattagagaaaaaattcaacaaggagaacaagactggcaaagtagaagctgaaggccgaagcccaaccgtcgagaaactggaggcatccattactaaactccagcagcgtatcgagaacatggagctccaggcccaagacaaggaagataataaggaagtggcccttggtacctcaaagattaattatatcgatcctagactcacggtcgtcttcagcaagaagttcaaagtcccaatagaaaagttcttctcaaagtctctgcgggagaagtttgagtgggccattaagtccgtcgatgagaactgggagttttga

SEQ ID NO: 28086 - DNA, 2628 bp, Emericella nidulans
tctgggttgactctcgggggtggttctggccgtgtgcgaccgacacaagccgctgccgcttttcccacctcgcatgatttcgccgaccctgatcgctcgtccgtcgcccgcaatgccaaccggccctcccgccgtttcgctgcacctccgcagctgtccgacgacttctcgctcgagtcacccactgattccgctcaagttcacgacaacctcctccaggacgctttattccccgaatggaaggccaattctcctcgaggggtcgacagccctgatgagatgcagaagaaggatccgttagcgactcaaatatggaagctctattctagaacgaaagctcagttgcccaaccaagagcgcatggaaaatttgacctggcggatgatggctctgagtctgaggcgtcaggaaagagagcgcgcccagcagcaagcccgtgcctccagccaaaagagtcctgttcctggcatgagtggcatcgctcagctccgtctgtctgatcgtgtttccaataccccgaccacaactgcagatactgtctcagatgctatgaaccttgacgacttcatcatccctttctctccgtctgaccacccatctccctccacaacgaaagcctccgaagccactactggtgctatacctatcaaagcccgcagggatcagtccgcgtcggaagccaccccagtacctgcatctttccctcacccggcccaggatcagcggagggagagtgagttcggatacgtaccgcgtagagtgcgcaagacgagcatcgatgagcgtcaattcttcaacctgcagattccgtcccgcaagcggccggccgagtcctcgcctcacgtaccgcctgtgtccaccagcatgctagctcatgacccggatttctcacatgctgtaccggagtataccttggatacttcgcatggactgtctctacagaatcagatgaacgctcagcagctcgccaatgctcagaaccacacctcccccaatatggcgttcgctctggatactttcaacctgggcgacgatcctatccttccatctgctggtccttaccagcagcaattcactttctcgcccagcgagtcaccgatgaccagcggtaacccgtttgccaacctctacgctcagactccgattgcctcttcactcaactcaaccgacttcttctctcctccgccgtccggctatcagtcgactgcttcgactcctcagcctgcgtatgatggcgaacactccaagtattttgatatgcccgtcgacgcgcggtcgcaacgccgggttgttcccgcttacattactcagcgatcatcgaatttgtctgcctcgctgcaacctcgatatatgtacaaccagggtggttcgtcccaggatattacacagcagaatgcccatatgggggcccagtcttcatccatgcaatcccctggcttttctatcccgcagcatgttgatccaacgcaagtgttgaatccgaacgagtttaacggtaaccacgccgcaatgttcagtttcggcgccgactcggatgttgaagatgacgatgggaaccaattttcggccggaggactggcaatgccagccgagttcggcgacgacagtatcagtgacatgaatagcaacatggcgtgggagacatcatatcccaactctttccagtcgctgcctgcttttgctgcacagcaccgaaagcatgttaccatcgggtctgcggacatgatggataccccgagcgagtggaaccagggcggaagcctaggtcgaactcacgagtcggctgcgtcagtcagcgaggtgcgcaatcgggatcaagaccctcgacggcagaagatcgctcgcacctcgtccactccaaacacagcccaactactacgccagagcatgcagaaccaatcgtcccacacgtctcccaacactccgcccgagtcgggtctaaacagcgctgctccatcgcggcccgccagtccaggcgggaccaagaacggagagcagaatggtcccaccacctgcacgaactgctttacgcagaccacaccgctgtggcggcgtaaccctgaaggtcagccgctgtgcaacgcctgcggtttgtttttgaagttgcacggcgtggtgcgcccactgtcgctcaagaccgatgtgatcaagaagcgtaaccgcaacagcgccaatagccttgccgttggctcttcacgggtatccaaaaagtcagcccgcaagaactcggttcagcaggtaactccgactgcgcctacctcgagccgggcccaaagcaatacgacatccgagtctcccccagcaatgccgggtagctccggccgaggctctggagtcgttcctattgcggctgccccgcctaaatctagctcagcggcgactacgtctccgggcacaaacaacggttgtggtgcggtacaggtggctcctaaacgtcagcgtaggctggaaaaggcctctgatgttgatatggcggaaagcccgtccagtacctcgtccggtggacgatccaaggttgttccattggcgccggctatgcctccagcggccgtcaacccagccaaccacagtatcgctgctggtcagggcgcaagccaggaatgggagtggttgacgatgagtttgtag

SEQ ID NO: 28087 - DNA, 2640 bp, Emericella nidulans
gacgatgagagatcgaatccggggaaagtcaggaagaagtcaaccaccgttcatcggaaatcactctcctgcgaatactgtaatcggtctttcgctcgtctcgagcacctccaacggcacctccgcacccatacaaaggaaaaaccattctcgtgcgatatatgctcaaagtctttcgcaagaagcgatctacttgtacgacatgagcgcctagtccatccagccgaggcggcagccaatcgagagaatcgcaaccatagccataccaatcatgaggtctctcaaacccaagcatcaatagtccaaccatcccaccatgaatctcgaatgctcgagttagtcgatgctattccgcttcagacccagccagttcctcctgctcctgaagttcaggttcagccccctccaatcgtggagacggcccatttcaacccttcatggggatatgatttgaaccttctttctcatgccgcgagtcatgtcgctcttgagggacaacaagaaagtctagagactcttcggaagccttcgcaaaacattcaagcgccgccgccgccgccgccgctttctcatataccagaaagagggatcactgataactatggtgttgagccttcgattctagaccttacagatttaggtgatccggttcaggactttaccgtcttcctagaaagcgtcggtctctcttcggactgggactccggcatcttctctagtgtagaagagcccttattgccaactagcctacccatggactcgaaacccccagcccgtgagagttccaggctgggccctgacttaatgggtgaccccagacctgctgccgatgagcctccatcattctctaactttgggtctcgactgccatcgctccagccggaagcccacgatgtggatgatcggctgggttttggcgacgaaggtccacgaccggcctgggatatatctaatgcggaccggcaggtttttatttctaaactggaagagtttgcctatgtccttccaaaggggttcgtgccgccgtcaaggcatgctctatcccgcttttttgctggttacataaatggcctgaacgagcatctccctttcattcatgtgccaacattatccattgctaaatgttcgccggagctaactctagcattggcggccgccgggtctcactaccgttttgagaacaaccgaggatttgatctctttcacgctgctaaggcgatccttctagagcgcttgcagagaagagatagtaagcaggtgcagtttccgacttggaattttctatccccttcctcaggctttcacaattcgcgtgggtcgtcggccaactccaacagcccgtaccaatcccaccaacatcagtcttatgttctatatccggtcgactccgcaagcttaccgcctgaagactcgtatgcgcatatggaggtgatcaagactttcttgctgctcacggtttttgcttcttgggagcggcaccctgagcttttacgagaaatcctgtctcttcagagcacattagccaggctcgttcgagaacatggtctcactgagtcgaacattggcgtggacccaaacaattgggaagagtgggttcggcgagaatgcaatagacgcaccaaactcattgtttactgcttcttcaaccttcattctatcatgtacaacatcccgcccttgatcttgaacgcagagctcaaattgaacatgccctgctcacatgacctctggaaggcaagcagcgccgctcaatggcgtcgtcttcttcgcacccgacatggttcggaggtttctttccaagaggctttcactaggttgttcacaaagtcgaacatcacaaacaccgcacctatatcgccgcttggaaactatattctgatacatgcgcttattcaacaaatcttcttcgctcgtcaactttgcctttctgctccaagcctgcatggaacgagtcttcggccagatgacttgaatatcctggatagttctttgggctcttggaaagcgctctggaaacgcacccctgagtcgagcattgatccgcagaacccggctggcccgattgcgttcacatctaccgctctgctagggctggcgtatatccgactgcatgttgatttagggccgtgccgccgcctcgtaacccaagatccggttcagattgcaagagcactcaatgactcgccacctatcgcacggagtccacgcctcataatggcccttctgcactctgcacatgctctttcaatcccggtgcgcctaggcatagattttgtggcgcgaacccactcgtttttctggagtatccagcactctctctgcagcttggaatgtgccttccttttaagccgatggctactgtccatacctgtaacgcaagctgaacaaaggctgtccgagcacgagaggaagttgctcctatggatcaagagcatgatggatgaaacagacatggctgttgatccagcaggggcacctgactttgatttcattgccaacccttataaggctaagcaactcagtgttgctattgtccgcgtatgggcaaggacattcaaggggaatacaagctgggctattgtggatttggttgggcaaagtttagatgcgtatgctgatctgctggaatcacaggtctag

SEQ ID NO: 28088 - DNA, 2667 bp, Emericella nidulans
agttcaccgctccgtcagagcacatcggctgcaaaccgcggtttgggaaatctgaatcggcgaaagcgatccagagagcctgatgacgatgcttcgtccgtggttcccccttcaagcccgcccccttcttcccctcctatgttgcccttcgacgaagacgaggacgagccagatgaggaagcagaacttgacattgatgacattgaggagatggcagaggatgaggatggcattgaccttttcggagatacattcgagcgcgactatcggggcggaaaagatgaccgctaccggcacgatacattgacgacgatgagcaagaagaaatcgacattggtgcccgacgagagttggaggctcgcctggatcgaagagatcgagaacttgctcggccgccgaatgcccgcagccttcttgcaagatgacgaggacggtgatatcgatttgactgcacagccacgccgtcgcaggcacgcctacgacgaggaccgcgatgacatcgaaatggctgacgacggcctcgaagagctttccctggaggagctagtcgatatcaaatcatctaatatcacggactgggtgacacagcctcaagtgctgcgctctatttaccgagagttcaaggcctttttgacggagttcactgaccccactggtagctctgtctacggaaacaagatcaagactcttggtgaggttaactctgcctcgctcgaggtttcatatacacacttgagcagcaccaaggctgttcttgggtacttccttgccaacgagcccacagaagttctcaaggtttttgaccaggttgctctggacgttaccttgttccactaccctcaataccatgatatccacaatgaaattcacgtccggatcactgatcttcccattgtttacaccctccgccaattgcgccagtcccacctgaactgtcttgttcgtgtcagtggagtcgtcacccgccggacgggtgtcttcccacagcttaaatatgtgatgttcatctgccaaaagtgtaacatgacgttgggcccttaccagcaggagagcagctctgaagtgaaggtcacaatgtgtcagaactgtcaatctagaggcccattcactgtcagctcagagaagacagtgtaccgcaattaccagaaattaactctgcaagagtcccccggttcggtccccgccggtcgacttcccagacagcgagaagtgatcctccttgcagacctcatcgactcagccaagcctggagacgagatcgagatcaccggtatttaccgcaacagctacgacgcgcagcttaataacaagaacgggttcccagtcttcgcaacgatcatcgaggccaaccacgttatcaagtcccacgaccagcaggctggtttccaactaacagaagaagatgagcgtgaaatccgcgccttgtctcgggacccggacattgttgagaagatcatccgttcaatcgcccctagtatctacggccaccaagacgtcaagacagccgttgctctctctctcttcggtggcgtccgcaaagaaacacaaggaaaaatgtcaatccgtggagacatcaacgtcctcctcctcggtgacccaggtaccgccaaatcccagatccttaagtatgtcgaaaagactgcccatcgtgctgtcttcgcaacaggtcaaggagccagtgcggtaggtttgacagctagtgtccgtcgcgatcccttgaccagtgaatggacacttgaaggaggcgccctcgtccttgctgaccgcggcacttgcctaatcgacgaattcgacaagatgaacgatcaagaccgcacatcgattcacgaagccatggaacagcaaaccatctccatttccaaggccggtattgttacaacactccaagcccgctgcgccgtcgtcgctgccgcaaaccccatcggcggccgctacaacagcagcgccccattctctgagaacgttcaactcacagaacccatcctttcgcgtttcgacatcctctgcgtcgtgcgcgaccttgtcgacccctctgaagacgagcgccttgccagcttcgtcatcgagtctcaccaccgcgcgaacccctccaagccgctgcgtgatgaacatgggaacctcattaacgccgacggagagcggatagacgaggaaggataccgcattgatgacgacggaattcgtctcccgctccgcccagacgagatagaagcccgtaacgcggctagggacaacgacgacgagaaggaaggcgagattccccaggaacttctccggaagtacatcctctacgcgagggaacactgccgccctaagctctaccagatcgatcaggacaaggtcgcgcgtctcttcgcggacatgcgtcgcgagtctcttgctaccggcgcctacccgataacagtccgccacctcgaagccataatgcgtatcgcagaagcattctgcaagatgcgtctctcggagtactgttccgctcaggacatcgaccgcgcgatcgctgtgaccgtggactccttcatcggcagccagaaggtcagcgcgaagcgcgctctttcaagagctttcgccaaatacaccctttcccgcccaaaaccacagtcaaagcgacgagctggcatcccggcgcctgtttccttcgagaggagacctcaggcagccaggtaa

SEQ ID NO: 28089 - DNA, 2676 bp, Emericella nidulans
ggggaaaagctcgacccggaactctcttccgacggacctcacacgaagtcgtcgtccaagggtcaagggaccagtacggacaatgctccagcgtcgaagcgacgttgtgtgagcacagcgtgcattgcttgccgcaggcggaaatcaaagtgtgatggaaatcttccaagttgcgccgcctgctcctccgtctatcatacaacctgcgtttatgatccaaactccgaccaccggcgaaaaggagtttacaagaaggatacggacacgttaagaactaagaactctaccttgttaactttgattcaggcgctgctcaactatgaggaggaagatgccttcgacctggtccgccaaatccggtcctgtgataacctggaagacgtagcgcaatctctcgtaaaccaggaaaagaagtcgtctggttggctgtcaaatgcggtaatacatgaagagaacgatatcgcgcagacggatcaattcgagtctgaattggctggaaagatgagcaacctcgtgctagacggatcccgcaagtttattggcgggacgtcaaacctcatcttcctaccacccggatcggaactcaacgagttcaagcctggcttggctactaacggcgatctggagggatccgtcacccggtggacgacagttactgatgatcagcagcttattagccatctcttgacaatgtacttttcatggcattatcctttcttcaccactctgtccaaggaactcttctaccgtgattactctcgtggagtgccgagccagtattgctcttccttgcttgttaacacgatgctggccttggggtgtcacttcagctcctggccaggggcccgtgaagatccagacaactctgctaccgccggtgatcactttttcaaagaagcgaagagattgatccttgacaacgacgagcttgtcaactcaaagctttgcaccgtgcaagctctggctcttatgtccgtacgagaggccggatgtggccgtgaagggaaaggctgggtttatagcggaatgagtttccgcatggcatttgacttgggcttgaatcttgagtcttcgagcttacgagatctcagcgaagaagagatagatgcaagacgcatcactttttggggttgtttcctcttcgacaaatgttggtctaattatcttggacggcagcctcagttcacgacagcgaacacaagtgtttccgcagtggatattctacccaacgaagaatcaacattatggtctccttacagtgatatggggcctagtcgggagtatgcacaaccttcgcggacaagggcagtcgcagaccagatttcccaattgtgtaagatcagtggagatctagtggtgtttttctacgaccttgctcccaaagaaaagccatcgtccaagcaactggagctaaagaagctaagtgagattcatactcgcttagaagcgtggaagaaaggcttgccgaaggaactcgagccgcgcgaaggccagcttccgcaggcgctactcatgcacatgttctaccaacttctcctcattcacctttaccgccccttcctcaaatacacaaagtcgacctccccgcttcctcagcatgtctctccccgcaagctatgcactcaggcggcagctgctatatcgaagttactacggctttataaacgcacatacgggtttaagcagatctgcaatatcgccgtttatattgcgcatacagccttgacaatccaccttctcaatctacccgaaaagaatgcacagagagatgtaatacacggcctgagacatctcgaagagatgggagagtcttggctttgtgctcgccggacgcttcgtattctcgacatatctgccagtaagtggcaggtacaactaccgagggaggccgttatcgtcttcgaacaaacacatgctcgatggggctcgtggggcccttgggaccaagcagcatcgccttcaacaacctcggattcaccgccatccgtcagctcccagtccgtggttgccaccacggatctatcccaacctgtatcccagtctgcgggcaatcagcctgccaatccttctatgggtacgtctccgaacctaacacagcccgtagcctctcaatattcttccacgccttctggacctgtctctgtatctgcaatgcgtgctgttcaacgatctttcagtgctcaacttgcacacaacgaagcccgacaacctgaacctacgtatctaagaccggtctctaccagctatggaccagttccgtcaactcagtctgcacaagagcagtggtacagcccaactgaggcacaattccgcgcatttactgctgctcacagtatgcctacaacatcagcccaatctccgttgaccacctttgatacaccagaaaatctggttgaggaaagtcaggactggtggtctcgcgacgttaatgcactacaactcggggccgaggactggactcagaattggaataatggtctccccaccacatcggccgactggcgctatgtggacaatgtccccaacatcccttctacatctgcgcccgatgccgattacaagcctccacaaccacctcccaacatggcaagaccgaatcaatatccaactgaccctgttgcgaacgtgaacagcaaccaaaccaacatgattttccccggcagttttcagcgatag

SEQ ID NO: 28090 - DNA, 2703 bp, Emericella nidulans
tcaatccttgtgcggccaccgaagcgtcgccttgccgacaccgagaatcttgaccagaaccaccgccgtgttttacgggatttcggccagggaaacagcgcgtcgacgccgatcaatacttcagccgactatggacgctttgacgaacgaccagggtcgggagatggttccagatacgcatcgccgtttcaagagttgagctccagtcagggatcgctgacgcgggtagaagactcactccagactcggaggaagttccccccaaatgcatcgatcgttttgattggtatacggggtacaggcaagtcgagccttgcggtaatgctcgcggccagctacggaaggcgcgtcattgaagcggacctgtattttcagcgagtcacaggacgctgccgaggcgtctataaacgagaacatacactctcagaataccgcaggcaggaagccattgttatggaatcgctacttatggagcatcaggaaaattgcgtaattgtctgtgggccaggcgacgtcgagcgtaatggacagatgcgactgcgggaatatgcgaaaactcaccctgttatccatatagttcgggacttggagagcattcagtcttacttaaaagcccgcgacaccgaaaaggttcgtcgattcctcgagctatcaggtccaatctaccgctcgtgttcaaatctcgaattcttcaacgtatctgagaaaggcattagcgatcaaccttctgctaaagacagccaacattacacacagtgggatgccgaggtggatcaacgaactcaaacaacaactccgttcctgatgcttaagcgattgcagcgcgattttcttcgtttcgtggcgctcgctactggtaatattcccgagttaagaaaccagctttcgcctttcccgctacatatgcagccaatcgaatcccgcaagtttacctatgccgcaactgtaccgatatctcacctcttagagaacgacgtggatattgaagagcttgaatccactgcggatgcttttgagctcaagattgacgtgtctgcagcaccttctgctcggctgggcaccgagtcgaatcttgcagacagcatcagtcacactgtggcgacagttagacggaatatcatagtacctatgatataccatgtcgagagtagtgtattccccgattcagcgccattgcggcgatccgacgcctcgtacttggaattagttctacatgggttacgcttggggcctgaatttgtgacagtagatctgtcattcgaggacagcatcctctctcagatcattggcacaaaggggtccagcaaggttattggacattattcgcagacccagcctcctccccaaggttggagtgaccccgagtatgaggcaatatatgaacgagcaaagaagcttggatgtgacatggttcgtttgacgcagcccgcaacgacaattgatgacaacttcgccgtcgagcgctttcgacatcaaatcaaaacccttcctgggccgcagttgcctgtgatcgcttataattctggtccactaggccgacaatcgtgctgcttcaacccagtattgaccccggtgatacctcgatcattgatttcacaatccggaacaaagggactcccgtctataaccatccaagaagcacaggaagctctttactcctcattcgtccttgaccctatgcagttctttgtcttcggcgcaaacacaacatacagtttgtccccagcaatgcacaatgccgccttcaaggtgcggggaatgccgcatatataccgcattcatcagtcgccgacactgcgaggtatcaattatcttgtggagaacccaaactttggcggaacaagtgttagcttgccatacaaaacggaggtaattcccttactccactcgatgtctcctcacgcccgtgcaattggggctgtaaacaccttaataccgatccggaacctggaaggcagcaccgacaacgccctagacttggaaaagaaccgagcaggaccaataaaaggcttgcatggagacaacacggactggattgggatcggtatatgcatacggcgaggcctgtcgccagcgaacgccatacgtccatccacaaccggccttatcattggagcgggcggaatggcgcgcgcggggatatacgcaatgattcatctaggtgtacaaaatatcttcatctggaaccgcaccgttgcaaatgctgagaagcttgcccagcattatatgcgcttgaacctctgcactctcggtggaagcggatcagcctcgtatacaatccatgtcttgaagtccctccaagaaagctggccggccaactacaaacagccgactatcgtcgtctcgggtattccagcacataggatcggtgaccagccggcgccgaacttccagctccctcctcagtggatcgagagcccaacaggtggggtggttgtagacctcgcctacaaaccattgaacactccgctcatgcgtcagatccgctcgctctcgcaccgcggctgggcggctcttgatgggcttgacgttcttcccgagcaggggtttgctcagtttgagctttttaccggatgtcgtgctcctcgacggcttatgaggacggtcattttacaagaatacaaagaggaggaacaaggggaggagtatgaccagagcgctatgcggactcgacttgagaatttggatgggcagccgatgtga

SEQ ID NO: 28091 - DNA, 2703 bp, Emericella nidulans
tcaatccttgtgcggccaccgaagcgtcgccttgccgacaccgagaatcttgaccagaaccaccgccgtgttttacgggatttcggccagggaaacagcgcgtcgacgccgatcaatacttcagccgactatggacgctttgacgaacgaccagggtcgggagatggttccagatacgcatcgccgtttcaagagttgagctccagtcagggatcgctgacgcgggtagaagactcactccagactcggaggaagttccccccaaatgcatcgatcgttttgattggtatacggggtacaggcaagtcgagccttgcggtaatgctcgcggccagctatggaaggcgcgtcattgaagcggacctgtattttcagcgagtcacaggacgctgccgaggcgtctataaacgagaacatacactctcagaataccgcaggcaggaagccattgttatggaatcgctacttatggagcatcaggaaaattgcgtaattgtctgtgggccaggcgacgtcgagcgtaatggacagatgcgactgcgggaatatgcgaaaactcaccctgttatccatatagttcgggacttggagagcattcagtcttacttaaaagcccgcgacaccgaaaaggttcgtcgattcctcgagctatcaggtccaatctaccgctcgtgttcaaatctcgaattcttcaacgtatctgagaaaggcattagcgatcaaccttctgctaaagacagccaacattacacacagtgggatgccgaggtggatcaacgaactcaaacaacaactccgttcctgatgcttaagcgattgcagcgcgattttcttcgtttcgtggcgctcgctactggtaatattcccgagttaagaaaccagctttcgcctttcccgctacatatgcagccaatcgaatcccgcaagtttacctatgccgcaactgtaccgatatctcacctcttagagaacgacgtggatattgaagagcttgaatccactgcggatgcttttgagctcaagattgacgtgtctgcagcaccttctgctcggctgggcaccgagtcgaatcttgcagacagcatcagtcacactgtggcgacagttagacggaatatcatagtacctatgatataccatgtcgagagtagtgtattccccgattcagcgccattgcggcgatccgacgcctcgtacttggaattagttctacatgggttacgcttggggcctgaatttgtgacagtagatctgtcattcgaggacagcatcctctctcagatcattggcacaaaggggtccagcaaggttattggacattattcgcagacccagcctcctccccaaggttggagtgaccccgagtatgaggcaatatatgaacgagcaaagaagcttggatgtgacatggttcgtttgacgcagcccgcaacgacaattgatgacaacttcgccgtcgagcgctttcgacatcaaatcaaaacccttcctgggccgcagttgcctgtgatcgcttataattctggtccactaggccgacaatcgtgctgcttcaacccagtattgaccccggtgatacctcgatcattgatttcacaatccggaacaaagggactcccgtctataaccatccaagaagcacaggaagctctttactcctcattcgtccttgaccctatgcagttctttgtcttcggcgcaaacacaacatacagtttgtccccagcaatgcacaatgccgccttcaaggtgcggggaatgccgcatatataccgcattcatcagtcgccgacactgcgaggtatcaattatcttgtggagaacccaaactttggcggaacaagtgttagcttgccatacaaaacggaggtaattcccttactccactcgatgtctcctcacgcccgtgcaattggggctgtaaacaccttaataccgatccggaacctggaaggcagcaccgacaacgccctagacttggaaaagaaccgagcaggaccaataaaaggcttgcatggagacaacacggactggattgggatcggtatatgcatacggcgaggcctgtcgccagcgaacgccatacgtccatccacaaccggccttatcattggagcgggcggaatggcgcgcgcggggatatacgcaatgattcatctaggtgtacaaaatatcttcatctggaaccgcaccgttgcaaatgctgagaagcttgcccagcattatatgcgcttgaacctctgcactctcggtggaagcggatcagcctcgtatacaatccatgtcttgaagtccctccaagaaagctggccggccaactacaaacagccgactatcgtcgtctcgggtattccagcacataggatcggtgaccagccggcgccgaacttccagctccctcctcagtggatcgagagcccaacaggtggggtggttgtagacctcgcctacaaaccattgaacactccgctcatgcgtcagatccgctcgctctcgcaccgcggctgggcggctcttgatgggcttgacgttcttcccgagcaggggtttgctcagtttgagctttttaccggatgtcgtgctcctcgacggcttatgaggacggtcattttacaagaatacaaagaggaggaacaaggggaggagtatgaccagagcgctatgcggactcgacttgagaatttggatgggcagccgatgtga

SEQ ID NO: 28092 - DNA, 2745 bp, Emericella nidulans
gcctaccacggctctggtccccagtcgcctggcgagcatacttatgatgacggccatcagctccgcgacctctcacactctaatacctcttacgaagaagaagcctctcatggattgttatccagccaacaaagccctttcgctggccccttcgatgacccccatcagcagcgtggccttaccgcttcacccgtacagcgtccgacgtctggatacagtttgactgagtcttacgctcccgacgccgcataccatgatccgtacagcgccaaccaatcggtctactccggccactcagagaaccctgcagccgcttttggcgttcctggacgtgtagcatcgccttacgctcgtagtgaaacttcgtctacagaagcgtggcggcagcgacaggccggcgctcggcgcggtggaaacgggcttcgtcgttatgccacaaggaaggttaagctggttcagggctctgtcctgagtgtggactacccagttcctagcgccattcaaaatgcaattcaagccaagtatcggaatgaccttgagggcggaagtgaggaatttacgcatatgcgatatacggcggcgacttgtgatcccaacgagtttacgctccacaacggttacaacttgcgtccagcaatgtataacagacatactgagttattgatcgccatcacgtattacaacgaagataaaacgcttaccgctcgtaccctgcacggtgttatgcaaaacattcgcgatattgtcaacctgaagaagtcggaattttggaacaagggtggccctgcctggcagaagatcgtcgtctgtctagtctttgacggcatcgacccttgcgacaaggacacattggatgttctcgccaccgttggtatctatcaagacggtgtcatgaagcgtgacgttgatggaaaggaaaccgtggctcatatcttcgagtataccacccaactttctgtcactccaaaccagcaactcattcggccgacggatgacggacctagcacccttcctcccgtgcagatgatgttctgtttaaagcagaaaaatagtaagaagatcaattcccatcgatggctgttcaacgctttcggtcgtatccttaatcccgaggtctgcattctcctcgatgctggtaccaagcctgggcctaagtctctgctttacctgtgggaggctttctacaacgacaaggatctcggaggtgcttgtggtgaaatccacgccatgttgggcaagggctggaagaaattgctcaatcccttggttgccgcgcagaacttcgagtacaagattagtaacattcttgacaagcctttggagagttcctttggatatgtcagtgtgttgcctggtgccttctcggcttaccgattccgtgccatcatgggccgtcctttggagcaatatttccatggtgatcacactctttcaaagcagctgggcaagaaaggtatcgagggcatgaacattttcaagaagaacatgttcttggccgaagatcgtatcctttgtttcgagcttgtcgccaaagcgggttctaaatggcatctttcgtacgtcaaggcctcgaagggtgaaactgatgtgccggaaggtgctcctgaattcatctcccaacgtcgtcgttggctgaacggttcgtttgccgccggtatctattcgctcatgcacttcggtcgtatgtataagagcggacacaacatcgtccgcatgttcttcctccatctccaaatgttgtacaactggttctcgactttcctaacttggttttctcttgcgtcttactggcttacgacttcggtcatcatggatctggtaggaactcccagttccagcaacggttacactgctttcccattcggtaaaacggcgactccaatcatcaataccttggtgaaatacatctaccttgcgttcctgctcttgcagtttatccttgcgctcggaaaccgtcccaagggatccaagttgtcatacctcgcatctttcgtcgcctttggtattatccagctttatgtagtcgtcgatgctctgtatctcgtcgtccgcgctttcactggaggggctcccatggatttcaatactgatgatggtatcggtgcgttcctgagctcattcttcggatctagtggagctggtatcattatcattgctcttgctgcaacattcggtctttactttgttgcgtcattcatgtatcttgatccttggcacatgttcacgtctttccccgcatacatggccgtccagtcgtcttacatcaacatcttgaacgtttacgccttcagcaactggcatgatgtgtcatggggtaccaaaggttctgacaaggcggatgcccttccttctgccaagactacaggaggcaaaggagaagaagctgttatcgaggaaattgataagccgcaggctgatatcgatagtcaatttgaggcaacggtcaagcgagccctgactccgtatgtgccacccgaggagaaggaagagaagagtctggacgactcgtacaagagtttccgtacgagactggttacgctctggctcttcagtaacggtcttctcgctgtctgcattactagtgagggtttggataagttcggatttacgaacacctctactgagcgtacttcacgtttcttccaagcccttttgtggtctaatgcggttgtcgctcttattcgctttatcggagccacatggttccttggaaagacaggtcttctctgctgcttcgcccgtcgg

SEQ ID NO: 28093 - DNA, 2748 bp, Emericella nidulans
gcctaccacggctctggtccccagtcgcctggcgagcatacttatgatgacggccatcagctccgcgacctctcacactctaatacctcttacgaagaagaagcctctcatggattgttatccagccaacaaagccctttcgctggccccttcgatgacccccatcagcagcgtggccttaccgcttcacccgtacagcgtccgacgtctggatacagtttgactgagtcttacgctcccgacgccgcataccatgatccgtacagcgccaaccaatcggtctactccggccactcagagaaccctgcagccgcttttggcgttcctggacgtgtagcatcgccttacgctcgtagtgaaacttcgtctacagaagcgtggcggcagcgacaggccggcgctcggcgcggtggaaacgggcttcgtcgttatgccacaaggaaggttaagctggttcagggctctgtcctgagtgtggactacccagttcctagcgccattcaaaatgcaattcaagccaagtatcggaatgaccttgagggcggaagtgaggaatttacgcatatgcgatatacggcggcgacttgtgatcccaacgagtttacgctccacaacggttacaacttgcgtccagcaatgtataacagacatactgagttattgatcgccatcacgtattacaacgaagataaaacgcttaccgctcgtaccctgcacggtgttatgcaaaacattcgcgatattgtcaacctgaagaagtcggaattttggaacaagggtggccctgcctggcagaagatcgtcgtctgtctagtctttgacggcatcgacccttgcgacaaggacacattggatgttctcgccaccgttggtatctatcaagacggtgtcatgaagcgtgacgttgatggaaaggaaaccgtggctcatatcttcgagtataccacccaactttctgtcactccaaaccagcaactcattcggccgacggatgacggacctagcacccttcctcccgtgcagatgatgttctgtttaaagcagaaaaatagtaagaagatcaattcccatcgatggctgttcaacgctttcggtcgtatccttaatcccgaggtctgcattctcctcgatgctggtaccaagcctgggcctaagtctctgctttacctgtgggaggctttctacaacgacaaggatctcggaggtgcttgtggtgaaatccacgccatgttgggcaagggctggaagaaattgctcaatcccttggttgccgcgcagaacttcgagtacaagattagtaacattcttgacaagcctttggagagttcctttggatatgtcagtgtgttgcctggtgccttctcggcttaccgattccgtgccatcatgggccgtcctttggagcaatatttccatggtgatcacactctttcaaagcagctgggcaagaaaggtatcgagggcatgaacattttcaagaagaacatgttcttggccgaagatcgtatcctttgtttcgagcttgtcgccaaagcgggttctaaatggcatctttcgtacgtcaaggcctcgaagggtgaaactgatgtgccggaaggtgctcctgaattcatctcccaacgtcgtcgttggctgaacggttcgtttgccgccggtatctattcgctcatgcacttcggtcgtatgtataagagcggacacaacatcgtccgcatgttcttcctccatctccaaatgttgtacaactggttctcgactttcctaacttggttttctcttgcgtcttactggcttacgacttcggtcatcatggatctggtaggaactcccagttccagcaacggttacactgctttcccattcggtaaaacggcgactccaatcatcaataccttggtgaaatacatctaccttgcgttcctgctcttgcagtttatccttgcgctcggaaaccgtcccaagggatccaagttgtcatacctcgcatctttcgtcgcctttggtattatccagctttatgtagtcgtcgatgctctgtatctcgtcgtccgcgctttcactggaggggctcccatggatttcaatactgatgatggtatcggtgcgttcctgagctcattcttcggatctagtggagctggtatcattatcattgctcttgctgcaacattcggtctttactttgttgcgtcattcatgtatcttgatccttggcacatgttcacgtctttccccgcatacatggccgtccagtcgtcttacatcaacatcttgaacgtttacgccttcagcaactggcatgatgtgtcatggggtaccaaaggttctgacaaggcggatgcccttccttctgccaagactacaggaggcaaaggagaagaagctgttatcgaggaaattgataagccgcaggctgatatcgatagtcaatttgaggcaacggtcaagcgagccctgactccgtatgtgccacccgaggagaaggaagagaagagtctggacgactcgtacaagagtttccgtacgagactggttacgctctggctcttcagtaacggtcttctcgctgtctgcattactagtgagggtttggataagttcggatttacgaacacctctactgagcgtacttcacgtttcttccaagcccttttgtggtctaatgcggttgtcgctcttattcgctttatcggagccacatggttccttggaaagacaggtcttctctgctgcttcgcccgtcggtaa

SEQ ID NO: 28094 - DNA, 778 bp, Emericella nidulans
gaggcgctggcggtgtcaacctacttcagacataccccggcaaagtgggggttcccagctccattttcgccccaatgggcagtcaccgagaggcacaagaagtcgccgacacgacgttcctcccagaagacgctgaggacaggcttgatcgcattgtgcgagcgacaatgaggacgaagaatgggtcgagccaggctggcgcaaagaagaggaagaccgacagcacgcaggagcccagtcgcgacgctaatgcggctaagaaggcgaggaagaacagtgaaagttcctccagacgaaaatcgggctcttctgccgtgggttttaagatgcccaagcgcaagagtaccaagaagaccggagacgactggtcctcggatggcgaagcggcaggtaatgtcgccagtagttccgccactcgaaggcgcagcaatagaggcagcgcttcacggcgaatcagctacgcagaccccgacagtgatgaagacgacatggagatggatgaattgaatcaggctcgagatgatgaagatgaaggcgaagatcaagccaaggacatcgaaaatggatctgacctcagcgaactgagtgaagcggatagcaatatgctagaggagcccgaggatgacgacggtccctcagaaaaagaagaccagcccgatgacaagcaaaacggcgacgacgatgcacagcctgcatccccggttccagtagcctcgaaggcgaaagtacctggtaaagcaatgaagaaggccacccttccaacgcgacgatcagctcg

SEQ ID NO: 28095 - DNA, 780 bp, Emericella nidulans
cccgcctggagactacgaacgcccaagatgtgcaggagttcatccgctctcctgacttcggcggcgccttccgtaacaattcgctcaagctcgacatcatgccccttctcgacgaagttgccgcggaagccgagatcatcggagctgttaacacaatcattcccgtgtcgactggcaagaacactccatcacgcctagtcggccgcaacaccgactggcagggaatgattctgtccctccgcaaagcgggagtctacggacccaagagaaaggatcaagagcagtctgccctcgtcgtcggcggcggcggcacggcccgtgcagccatctacgccctgcacaacatgggctactctcccatctacatcgttggccgcaccccgtctaagctggaaaacatggtctctactttccccagcagctacaacatccgcatcgttgagagcccttcaagcttcgagtccgttccgcacgtcgcgattggtacaatccccgccgatcaaccaattgacccgactatgcgtgagacactgtgccacatgttcgagcgcgcgcaggaggcagacgctgaagctgtgaaggccattgagcatgcgccgcgtatcctgcttgagatggcgtacaagcctcaggtgaccgcactgatgaggctggcgtctgattcaggctggaagactattcctggtttggaggtgctagttggtcaagggtggtatcatagtttaaatactggactgggatctcgccgctatatgagagtgccagggcatgtagctcccc

SEQ ID NO: 28096 - DNA, 782 bp, Emericella nidulans
tccgtcagtagctagtgattcgtcgtcgactgaccgtgagtctgagtattcattcaatggtgacagctgttccgggctatcaagtccagcatcgcctggcaccgtatcgccaccaaatgagaaggttatccaaattcatgagaacggcactatgaaagagattcgcgccattatagccgacgaaattggtgtctcggcagacgaaatcaagagcgatgaaaacctaaatgaattgggaatggactcgcttctctcacttacagtcctaggcaaaatccgcgagtcactggacatggacctgccgggagagttcttcatcgagaaccagaccctggaccagattgagactgcgctggacctgaagcccaaagctgtcccgaccgctgtcccacaatcgcagcccataaccctaccacaatcacaatcaacgaaacagctttccacgcgacctaccagcagcagcgacaaccatcccccggcaacctccattctcctccaaggaaacccgcgcacagcgtcaaagaccctctttctcttccccgacggttctggctccgcaacctcctacgccacaatacccggagtctccccaaacgttgccgtttatggcctcaactgcccctacatgaaagcccccgaaaagctcacctgcagcctcgattcgctgacaacgccgtatctcgccgagattcgccgccgccaaccaaccggcccgtacaaccttggcggctggtcgcaggcgggatctgcgcatacgacgcggcacgcaagctcgtactgca

SEQ ID NO: 28097 - DNA, 782 bp, Emericella nidulans
ccgtgatgcgcatattgcaaccctggatacaatagccaccggtgttcgcgactcctactcctcgattgaggggcgggttgaaaacttgactggccggatgaaccagttccaacaagaagcaacccatcatcatgccactctggaagaatccattgctccgctatcaaacgatgttaggaagccccttacggacttgtcttccagttttcaaaatcgttctctggaggagtatgtcgccactggtgtcaccccgaagaaacggaagtacgactatatttctgtcttgcctagcacggagtctcatgaggtcctcaagtctcgcctgagaacaacaaaggagatggaagtccttccattcaacagcgacgaccagttgtccggcccttccagctctcccggaggttctccgtcgaaaggcttcgtttacaatgacgtcgaggacgaggtaggaactcatgcaccaaccgtgaccaacgtcaacccttccaacactggacttagggaagtcgatgcaaacgtcgccgcaagaccgctcgtgtatagcacgggcgagaaatccacggaccaggatggttccccagttgtcagcccggatagcgcgacagaagcagaagggatgaacggaccaccatccaaaaggcgacgctcaaattcagttgttgctgatactaagttgccaaacaagatgctcgctaggaggatggctggcatgatggaggggagggaaaacgttccgcctcctggtatttccaatgggcgccgactgagggggcgaccttcgc

SEQ ID NO: 28098 - DNA, 786 bp, Emericella nidulans
tgatgccaacgcatgctattttcagttttgtgcgtccggctagttttatgtttggtaatatgatggagcggcctgccttcaccagctggctcgggcaaaatagtaaacaaggtttgatcatcgtctttggagtaattgcacgcgaggctgatgttgtacacgcaggaaaactctcgagatatgtgaaggaaatccaaggacgcatgcggcttcgcgcctctggagatcgccacgaggtccgacagcaatacataccactattatgggacagactcgttaagcggctgatggtagacggcaaagatagtgttgaagacgttgttgattttatggacagttattttcttaccagggatgactgggatgctcttgtcgagctcggacttgggcctatggatgattctaaagtcaagctggagacgcagaccaaagccgccttcacgcgtgtttacaaccaacgctcacacccgcttccatatatgaaggctagcaatgttcttgcgccgaagaaggcgccgaaggaaaaacccgacattgaggatgccatcgacgagtcggacgaggatgacgtccttgtggacgacactaaagatgacgaagatagcgacgagattgatctcaagaaggacaaacttattcgtgtgcctaagaagtctaccgctaagaaaagttcaaagagcagcacatcagcgaaaggcaaaggaaaatccaagaaaacaagcgcggacaatttcatcgacgacgaggacgacgatgcgccgaagccaaagaaagcgcgaggcaaaa

SEQ ID NO: 28099 - DNA, 786 bp, Emericella nidulans; identical to SEQ ID NO: 28098

SEQ ID NO: 28100 - DNA, 205 bp, Emericella nidulans
atgttacaatcagctagaataataggaacaggattagctacaacaggtttaatcggagcaggtgtaggtatcggtgtagtatttggtgccttaatcttaggagttgcaagaaaccctgcattaagaggtcaactgttttcatatgcaattttaggatttgcatttgcggaagcaactggattatttgctttaatgatggcttttt

SEQ ID NO: 28101 - DNA, 791 bp, Emericella nidulans
gtgatatatcaatctaaaagaaattttcaaaaccatccgttccatttagtatcaccatcaccttgaccattatttactagtatttcattatttatacttacaacagcaacagtattatttatgcatggtttcgaaggattccaatatttagtaccagtagcagtaattaatgtaatgtatgtaatgggtttatgatttagagatgtaatatcagaaggaacatatttaggaaatcatactaatgctgtacaaaaaggattaaacttaggagtaggtttatttattatctctgaagtattctttttcttagcaatattctgagcattcttccatagtgctatctcacctagtgtagaattaggtgcacaatgaccaccattaggtatacaaggaataaatccttttgaattacctttattaaacacaataattttattatcatcaggtgttactattacatatgcacatcattcattaatacaaggaaatagaaaaggtgcattatatggtacagttgtaacaatactattagcaatagtattcacattcttccaaggagtagaatatacagtatcatcattcacaatatctgatagtgtttatggatcatgtttctattttggaacaggtttccacggtttacacgttataattggtacagcatttttagcagtaggtttatgacgtttagctgcttaccacttaactgatcatcatcatctaggatacgaatcaggaatcttatactgacattttgttgatgttgtatgattatttttatatatatcagt

SEQ ID NO: 28102 - DNA, 791 bp, Emericella nidulans
gtgatatatcaatctaaaagaaattttcaaaaccatccgttccatttagtatcaccatcaccttgaccattatttactagtatttcattatttatacttacaacagcaacagtattatttatgcatggtttcgaaggattccaatatttagtaccagtagcagtaattaatgtaatgtatgtaatgggtttatgatttagagatgtaatatcagaaggaacatatttaggaaatcatactaatgctgtacaaaaaggattatacttaggagtaggtttatttattatctctgaagtattctttttcttagcaatattctgagcattcttccatagtgctatctcacctagtgtagaattaggtgcacaatgaccaccattaggtatacaaggaataaatccttttgaattacctttattaaacacaataattttattatcatcaggtgttactattacatatgcacatcattcattaatacaaggaaatagaaaaggtgcattatatggtacagttgtaacaatactattagcaatagtattcacattcttccaaggagtagaatatacagtatcatcattcacaatatctgatagtgtttatggatcatgtttctattttggaacaggtttccacggtttacacgttataattggtacagcatttttagcagtaggtttatgacgtttagctgcttaccacttaactgatcatcatcatctaggatacgaatcaggaatcttatactgacattttgttgatgttgtatgattatttttatatatatcagt

SEQ ID NO: 28103 - DNA, 870 bp, Emericella nidulans
cccgctatggtaaggacaatgttcgagtctacaaggtccacaaggacccgaagactggagttcagaccgtcactgaaatgaccgtctgcgtcctcctggaaggtgaaatcgatacttcctacaccaaagccgacaacagcgtcatcgtcgcaacagactccatcaagaataccatctttattctggccaagcagaaccccgtcacgcctcccgagctctttggctccattcttggtacccatttcatcaacaagtacaagcacatccacgtcgcgcataccaacatcatcacgcaccgctggacccgccttaacatcgacggcaaaccacactcacactcctttgtccgcgacagcgaggaaacccgcaacgtgcaagtcgacgtgaccgagggcgtcggcattgatatcaagtcctcaatcaacaagctcaccgtgctcaagagcacgggttcgcaattctggggcttcgtccgcgacgagtacacaacactccccgaagtatgggaccgcatccttagtaccgatgttgaagcgacgtgggcatggaaaaggttctctgggctggatgaggtccgtgggaatgtgcccaagttcgatgagacttgggaggcggcgcggaacattacgctcaagacatttgccgaggaggagagtgctagtgtccaggcgactatgtacaagatgggcgagcagattctagcgtaccagccgcttcttgagactgtcgagtactcgttgccgaataaacattactttgagattgatctgagctggcacaagggccttaagaacacgggcaaggatgctgaggtgtttgttccccagacaaaccctaacggactgatcaagtgcactgtcggccggaagt

SEQ ID NO: 28104 - DNA, 966 bp, Emericella nidulans
tggtccatcttaaaaccctcgccggcagcgctgtctttgcctcgctggccaccgcggccgtcctcccccgtcaaagcgccagcctaaatgatctttttgtcgcggccggcaaatcctactttggcacttgctccgaccaggcgctgctgcagaactcgcagaacgaggccattgtggcgtcgcagttcggagtgatcaccccggagaacagcatgaaatgggacgcgcttgaaccgtctcaggggaactttggctggtctggagccgactaccttgtcgactacgcgacgcagcataacaagaaggttcgcggacatacgctcgtctggcactcccagctcccctcttgggtctcgtccatcggcgatgcgaacacactcagatccgtcatgacgaaccacatcaatgaggtcgtcggccggtacaagggcaagatcatgcactgggacgtcgtcaacgagatcttcaacgaagatggcaccttccgcaacagcgtcttctacaacctcctgggcgaggactttgtgcggattgcgttcgagactgcgcgcgccgcggaccctgatgcgaagctgtacatcaacgactacaacctggactctgcgagctacgccaagacgcaggcgatggcgagctacgtgaagaagtggttggcggagggcgtgcctatcgatggaatcggctcccaggcccactacagctcaagccactggtccagcactgaagccgcaggagcgctgtcctctctcgctaacacgggcgtctccgaggttgccatcaccgagcttgatattgcgggcgcagcctcgtccgactacctgaacttgctcaacgcctgcctcaacgagcagaaatgcgtgggcatcaccgtctggggagtgtccgacaaggactcgtggcgcgcgtccgacagccccttgctgtttgacggcaactaccagcccaaggatgcctataacgcaatcg

SEQ ID NO: 28105 - DNA, 1040 bp, Emericella nidulans
tgtaaatcaagtaatatttgcatttatagtgttaactatattaatctatgcatttaataaatatatattacctagattattatatatatatacaacacataaaaaagttataaaaaataaagtaaaagttttaaataatgatatcaataaaacttgtgaatttttagaaataacattagttgaaaaaataattattagaattaatactgtaaaaattataactatttttttaataagaccattaataaaaaaattattagatatattacaagaattattacaacaactaggttatagcataggagctgtaccagaaaacataatatattatatttctatcctagttggatttattatgttattaggtatatttgaatttgagttgttaaactgaataaaatctttaaaacccaatttaggaattatggaatgtttaataaattatataaagacaaataaaatacaagcaacaataaaatcaataggtcctggtgttttaacaaatattaaatctgacaaagaaggaagaatattaggtccagatggttcattattaggagaagaaaataaaggtaatatatatgaatattatatacaagatgaagttatagttagatcagatggctttaaacgtggattttatgataaagattgaggtatagcttctgaagaaatgcctaaaggtagtaattacactaataagtgtaaggttcataatacaaaggttgaaattgttaacaataaaattaattatctgagagattgagctgctcatttaaaaaataattacacatttgaatttattgtatgccctaattatagaattaataatgagcaaataaatattgcaatcaaccatataaatgaacatatgaaggtttatgatcaattaaatgagttaataactagatataataattattataatcatattaaaataaaaaaaccatatctaccattagtgttaccaccacttaatgtagaagctgacagggatttaatacgtagccttgaaaatttagaacaacatttaaaaatac

SEQ ID NO: 28106 - DNA, 1051 bp, Emericella nidulans
tttaatttcaataattgaaggtcttttagtaattgttcctgctttattatcagttgcttttgtaacagtagcagaaagaaaaactatggcaagtatgcaaagaagattaggtcctaatgctgtaggttattatggtttattacaagcatttgcggatgctttaaaattattattaaaggaatatatagcgccaactcaagctaatatattattattctttcttggtcctataataactttaattttctctttattaggttatcttgttattccatttggttcaggtttagatatatctgattataatttaggtatattatatatgttagctgttagttctttagctacatatggtatattattagctggttgatcagctaattctaaatatgcatttttaggttcattaagaagtacagctcaattaattagttatgaattaattttaagttctgtaattttattagtaatattattaacaggaagtttaaatattattactataatagaatcacaaagagtagtaaatttattattccctttattccctttattcttagtattctttataggttctatagcagaaactaatagagctccttttgatttagcagaggcagaatcagaacttgtaagtggtttcatgacagaacattcagctagtatatttgtattctttttcttagctgaatatgctagtattgttttaatttgtattttaaatagtatcttatttttaggtggttatttaagtattatacctttagattttattgtaaatatcttaaatttatttgttattactaataatactattttatttgatatatttgtacatatttcttcttctcctattaatttagcattaaaaacagctttcttaatctttgtattcatttgagttagagcttctttccctagaatacgttttgatcaattaatgtctgtttgttgaactgttttattacctataattattgcttatgttgtattaataccttgtattgtatatggtctaggtataataccaacaaacatttcattattatag

SEQ ID NO: 28107 - DNA, 1164 bp, Emericella nidulans
aaaaagcattaaatgatgagaatgtaagtttttataataaaaattttgtacctgctgtaagagattgaaaaaatagtatttatgtatataataaaaatactttaagtttaatacctgttgcaagtagattagtaatgaaattaattaaaggttattttaattcatataatttaaatatagaatctaaattaagaaataaaagattacgtcgtagatatagaaaattatcaacaaataaaatttttatcagtgaaggtgagtttaaacatactaatgataaaattaatataacattatatgtatataataaacaaaaactaaactatttagctaaattaaaaaaaaaatatacaagcttatttggaaaagatatatttattaaaaaattacaattaataaaatctaaagcaataggtatattaactcaacaacaaaaaaaaagtaaaacattaacaaatgtattacctaaatatagtacaaaagtaaataaaatacaaaatatttattatagaacttatataaaaaaatcaattaaaagattaaaatattatatgtattataaacaattactttacataaataaagcaaaatttgaaaattcatatttacaaggtttaattgatttaatcaaaaaaatatataaaaaaaatatagaatttaatataataaatttaaaatacttatattttaatagtgatatctacacacaaccattagtattaaaattaagaaaaaaaagagatttattaagatatttaaaagatttagtaaataaagcaaaaatagaaaaagtaagtttaaataaaagatcagaatattattttaacttagaaaatttatttacaagaaataatgtagatattacaaataatttattaaataatttaatgcaatataataaaaaaaattcagagtatttaaaaaaagttatattaaatgatataaaatataaaagagtatctggtgttagattagaagcagcaggaagattaactaaacgttatacagcttctagatcacaatataaatttaaatataaaggtaatttagtaaatacatattcatctattcaaggttatccatcatctttaataagaggaaatgataaacctaatttacaatatacaaaattaaattctaaatcacgtattggatcttttggtg

SEQ ID NO: 28108 - DNA, 1358 bp, Emericella nidulans
atgacctccaacggtaccaacggcagtgctactgcataccatgcctcgtctactcaagaggccatccaggctgagaacgactttgctgcccacaattaccatcctcttcccgtcgtttttgcgcgcgctcaagggacatccgtttgggatccagaaggccggcactacctcgacttcctctccgcatactccgccgtcaaccaaggtcactgccatcccaagctagttgcggccctcgtcgaccaggcctcccgtctgacgctgagctcgcgggccttctataacgatgtattccctaagtttgccgagatggtcacaaagtactttgggttcgacatggtcctccccatgaacaccggtgcggaggcagtcgagaccggtatcaagatcgcccgcaagtggggttataaggtcaagggcatccccgagaatgaggcgatcatcctcagtgcggaaaacaattttcacggccgaactatggctgccatttctttgtcctccgaccccgagtctagagagaactatggcccgtacgttcccaacatcggctgcaccatcccagggacagaaaagccgatcacctacaacgataaagctgtgcgcgaagctttcgagaaggccggctccaacctcgccgccttcctcgtcgagcctatccaaggcgaggcgggtatcatcgtccccgatgacgattatctgcagctggccagatcgctgtgtgaccagcataatgtgctgctgatttgcgatgaaatccagaccggtattgcgcggacaggaaagctgctctgccacgagtggagcggaatcaaaccagatatggttttgctgggcaaagcgatctctggtggcatgtaccccgtgtcctgcgtgctaggacggaaggatgttatgctcacggttgagcccggaacccacggctcaacctacggaggcaaccctcttgcctgcgctgttgccatccgcgctcttgaggttgttcaggaggagaacatggtggaacgcgctgagaagcttggccaggccttccgcagcggcttggaagccatccagaacccgatcattcagacggttcgtggaaagggcctgctcaatgcgattgtcatcgacgagtccaagaccaacggacacactgcatgggatctctgcatgctgatgaaggaaaagggtcttctggccaaacccacccatcagaacatcatccgtctagcaccgcctctcgtcattaccgaggaagaaatcgcaaaggcgctggaaatcatcaaggccgccgtggctgagctgccgaatctcaagggtgctgcggaagataaggtcgtccctccgccagagaagaaggtgaagattactctcgagaa

SEQ ID NO: 28109 - DNA, 1447 bp, Emericella nidulans
cctgcgggtgattaccattggagctggcttttctggaattttgatggcgtatcaaatccagaagcaatgcgcaaatatcgaacatgtggtgtacgagaagaatcatgatattggaggcacttggctcacaaatcgttaccctaatgcaggctgtgatgttcccagtcatgcgtatacgtatcggtttgcactttaccccgattggcctcgttacttctcctacgcgtcggatatctgggagtatctagacaaagtttgtgcagccttcaaattacgacagtacatgcagttccgaacagaggtcatcaaagcctgctggaacgaagaggaagggcagtggaaggtacgtctccggcgacagcggccaggacaggaaccggaagagttcgacgaccattgccatatactgctgaatgcatgtgggtggccagatacgcctggactccacgatcgcttcaagggccgcgttattcacacggcagcttggcctgacgactatggcgaggtgcagtggaacagcgatcgcgtcgccgtaattggctctggtgcttcttccatccaggccgtggctgggatacaacctcatgtcggtcatctcgatatctttgtgcggacgggtgtgtggtttggagtccttgcaggaaacaccggcgcgccaaccaaaatctacagcgaggccgagcgcgcgcaattcaggtccaatccttcagcactagtcgagcatacaaagagtatcgaggcagaagtaaacggcatgtggggggccttctaccgggattctatggcgcagaagggcgcatcggccttctttcgacagcgtatggcgagcattatcaaagatgatagactggccaagggcttcacgccgacttttggtttcggatgccgtcgcatcacaccaggagacccgtatatgcacgccattcagcaggcgaacgtcgatgtacatttcactgccgtagccagctgcactgaagatggcatcgttggcgctgatgggattgagcgattggtcgacaccatcgtctgtgcgtcaggattcgacaatacatatcgtccgcaatttcccatcatcggccgacggggcgtcgatctgcgagataaatggaagacaaatcccgaagcatacctgggtctggccgtgccagatatgcccaactacatcaccttcattgggccctcgtggccgattcaaaacggtagtgtgatggcgccgctgcattcggtatctgaatatgcgattcagttcctcaaaaagatgcagaacgagaatatccgggcctgggcgcctcgccagcagattacggaccgcttcaacgagcatgtacaggagtgggtgaagcacacagtttggagtgatcaatgtcgcagctgtacgttagcacttgtgaatgcagcaccattcttttttttttctttcttctttctcctacttaagctttcttag

SEQ ID NO: 28110 - DNA, 1742 bp, Emericella nidulans
atgttccgatcatgtctgcgacattgccgccgcgcgaccgtccgctctcgaacctgtccgcgatgctcgcaccatgagataccccaattacaagtcgtccaacgacagatctcactttcgtcctctttcccccatatccgccgccttcagacgtcctctacggacacacaagagcgtattcccatccgtaaacaactcaagcaggaagccaaagccataaaatctcggaagcgagaacgacgagaacaggaggaagcttctcggcataagtgggagttgactgtgggagtggagatacatgcgcagttgaatacagagacgaagctcttctcaagagcaccgacctcaccctccgaacttcccaacaccaacgttgctctgttcgacctcgcgtttcccggcagtcaaccggaattccaagtggcgacccttctgcctgctcttcgcgccgcaattgctctgaactgcgatatccagccggttagtcgttttgaccggaagcactatttctatcaagatcagccgtcgggctaccagattactcaatactacgaaccattcgccagaaatggctacctcgaccttttccgccatgacggtattgctccagaggacggagaccgggttcgtatcggcattaaacaaatccagctcgaacaagacacggcgaaatcgcaagaataccctccatccatgcagctcctcgatttcaaccgtgtttcccatcctctcattgagataattacaatgcccgaaatccacactcccgccacggctgccgcatttgtgcgtaaggttcaagccatccttcaatcgtgtagcgccgtaactaccggaatggaggcgggtggtctccgcgcggatataacctctcggtacggctacgagatcaagaacctgagcagcttcaaggcagtagaggacgcgattatcgcagagaagaacagacagattgctgttctcgagagcgggggtgttgtcgaaggcgacacgcgtggctggacgattggaagcaccgaaacacggaaacttcgaggaaaacagggcgacgtcgactatcgatacatgcccgatccagatattccgcctctcctgattggcaaggatatcatctcggcgctttcgaataccctgccggcgggtccggatgcacttatcgacatgctagtcggccagtacggacttgccatagaagacgcaaagccgcttgttgaacttgaagacggggcacgactagagtattaccaggatgttgtcgatatcttacctaacctacagcaagatctcgattcaaagactcaagccggtctcggcagtgttgctggcaactgggttctccacgaactcggcggtttactgagcaaggctggcctagcctgggatgccgaaagagttacagcggagtctctcgcggcgcttatcgaccagctccagcgaaagcgcattactggagcgacggccaaaaaggtgcttgccatgttatttgacggagaccgacggcctgtcgctcaactcctcgaggaggaaaatctgatcttgcggctgtcgcgtgaggaatacattgctctcgcttcagcagctatagagctgaacccgcaaatggtagaacagatccggagtaaaaaccagcttggcaagctgggctggtttgtgggccaaatgatgcgtatgggtgaaaaaggtcgtgtggaggcacaaaaacgtgacgcgattctgcgagagcttattctaggattgtcgca

SEQ ID NO: 28111 - DNA, 298 bp, Emericella nidulans
tttttgaagtaacgaatttaggactaaacaaagagagataagggggaaatacgacccagatgtagggtgatttagctatttttttagatcattaataacgtgtatactgacgttaaaccaaaattatgtggttacaatttcacaaattttaggtaatgatttagaaagtagattagctaataaagtattacaagattatgtttttaatagcttaagtttaccaaataaatataattttattatgtcaattggtaattataattcaataccccataatccgactatcacaaaattttag

SEQ ID NO: 28112 - DNA, 385 bp, Emericella nidulans
cgtctctctcctcgccttcactgccgcggccaccgcaaccgccctcccggcctctgccgcaaagaacgcgaagctggccacctcggcggccttcgccaagcaggctgaaggcaccacctgcaatgtcggctcgatcgcttgctgcaactcccccgctgagaccaacaacgacagtctgttgagcggtctgctcggtgctggccttctcaacgggctctcgggcaacactggcagcgcctgcgccaaggcgagcttgattgaccagctgggtctgctcgctctcgtcgaccacactgaggaaggccccgtctgcaagaacatcgtcgcttgctgccctgagggaaccaccaactgtgttgccgtcgacaacgctggcgccggtacc

SEQ ID NO: 28113 - DNA, 392 bp, Emericella nidulans
gcactaagcagactgcccgcaagtctactggtggcaaggctccccgtaagcagctcgcgtccaaggctgcccgtaaggccgctccctccactggaggtgtcaagaagcctcaccgctacaagcctggtaccgtcgctctccgtgagatccgtcgctaccagaagtccactgagcttctgatccgaaagctccccttccagcgtctggtccgtgaaatcgcccaggacttcaagtccgacctccgcttccagtcctccgccatcggtgctctccaggagtccgttgaggcctacctcgtctccctcttcgaagacaccaacctgtgcgctatccacgccaagcgtgtcaccatccagtccaaggacatccagcttgctcgtcgcctccgtggt

SEQ ID NO: 28114 - DNA, 412 bp, Emericella nidulans
ggccgcctctcgtgtcttcgctcagcgcctggcctcgaccatgaaggtcgctcgccctgccgcccgcatccaggcccgcaccctcaccacccagcgcatggccacccccttccagaccatcaagcgccagcaaccctccatgatccaggcctccgctcgccaggccttcgctgcccgccgccagtactcctctgagatcgccgacgccatggtccaggtctcccagaacattggtatgggctctgctgccatcggtcttggtggtgccggtatcggtaccggtgtcgtcttcggttccctcctccttgctgtgtcccgcaaccctgctctccgtggccagctcttctcctatgccattcttggtttcgccttcgtcgaagccattggtctgttcgacctcatggttgccatg

SEQ ID NO: 28115 - DNA, 439 bp, Emericella nidulans
ctcattgctcgtcgcggtccgggctcctcgcactgcctcgtgggggatcaggacagccagggtacggcactcaatcgtcaagtaacgttgtgggagacattgatgtgcgcgcgtcgactcacaaactcaaccgcaaggacaattctgccgataagggagacactcttagaccggaattcagtggggatcctgactcggccgtggaaaacaacaagttcgccttctcgcccggccagctggataaactcttgaaccctaagaacttcggcgcttttggcgcttttggtggattacgcgggctggaaaatggtttacggaccaacgtgcagagcggcctgagcatggacgaaaccgtgttggatggtatggtgaatttcaacgaggcggtttcgcggaccttcgtgccagcacccaagtctgcctctccagccccattggc

SEQ ID NO: 28116 - DNA, 447 bp, Emericella nidulans
tgctgccgctgtcgttgctttcgccgcctccgtcgcggccctccctcctgcccatgattcccagttcgctggcaatggtgttggcaacaagggcaacagcaacgtcaagttccctgtccccgaaaacgtgaccgtcaagcaggcctccgacaagtgcggtgaccaggcccagctctcttgctgcaacaaggccacgtacgccggtgacaccacaaccgttgatgagggtcttctgtctggtgccctcagcggcctcatcggcgccgggtctggtgccgaaggtcttggtctcttcgatcagtgctccaagcttgatgttgctgtcctcattggcatccaagatcttgtcaaccagaagtgcaagcaaaacattgcctgctgccagaactccccctccagcgcggatggcaaccttattggtgtcggtctcccttgcgttgcccttgg

SEQ ID NO: 28117 - DNA, 534 bp, Emericella nidulans
tccaaggagcccgaggtggaacaggaacctcattcgggtgaagaacacgagcaaatggacaaggaacaagataaccaaacgcaaggtcagggagagttcgaggtgaaggaacaagacagatggctaccaatcgcaaatgttgcgcgcatcatgaaattagcattgccagagaatgcaaagattgcaaaagaagctaaagaatgcatgcaagaatgcgtgagcgaattcatctcttttattactagcgaggcttccgaaaaatgtcaacaggaaaaacgcaagacagtcaatggagaggacatcctgtttgctatgacctcgcttggctttgaaaactatgctgaggccctcaaaatctatttgtcgaaatatcgagagactcagtctgccaggggagagcatcagaatcgtccgccaagtagtgggtatgccgggggggacccgtcggcggagctgccagcggcccttcagtcgtgcgtgccgggggtgctgcagctggaggcgccttccccgaagcctctgataatgcaggca

SEQ ID NO: 28118 - DNA, 534 bp, Emericella nidulans
gacgcccggccgacatccgccgtgccaccgaggcggacatgccggcggtctgcaccatcgtcaaccactacatcgagacaagcacggtcaacttccgtaccgagccgcaggaaccgcaggagtggacggacgacctcgtccgtctgcgggagcgctatccctggctcgtcgccgaggtggacggcgaggtcgccggcatcgcctacgcgggtccctggaaggcacgcaacgcctacgactggacggccgaatcgaccgtgtacgtctccccccgccaccagcggacgggactgggctccacgctctacacccacctgctgaagtccctggaggcacagggcttcaagagcgtggtcgctgtcatcgggctgcccaacgacccgagcgtgcgcatgcacgaggcgctcggatatgccccccgcggcatgctgcgggcggccggcttcaagcacgggaactggcatgacgtgggtttctggcagctggacttcagcctgccggttccgccccgtccggtcctgcccgtcaccgaga

SEQ ID NO: 28119 - DNA, 554 bp, Emericella nidulans
  unsure (1)..(554): unsure at all n locations
cgctcggacgatgatcggtgtgttcaagaacattgagtacatgtgctccaggacatcaagcaagacgtggggcaaagatgcctggaagaagattgtggtttgtgtcatcagtgacggtcgtgcgaagatcaatccgcgaacgcgcgctgtccttgctggtttgggatgctatcaggatggaattgccaagcagcaagttaacggcaaggatgtcacagcacacatctacgaatataccacgcaggtgggtctagaattgaagggaggccaagttagcctcaagcctcgaactggatgccccgttcagatgatcttttgtctgaaggaaaagaaccagaagaagatcaactcgcaccgctggttcttccaggcatttggtcgcgtgctggatcccaatatctgcgttctgttggacgcgggtacccggccnggaaaggactcgatctaccatctttggaaggcnttcgatgttgacccgatgtgtggaggtgcttgtggtgagatcaaggtcatgtngtcgcatggaaagaagctgctcaacccgttggttgccg

SEQ ID NO: 28120 - DNA, 576 bp, Emericella nidulans
caagaaccgtcttctgccgacctcgccgcccgcgaggccgaagaaaagcaacgcaaagccgccgaagaagctgagcaggcgaccctcccctacaaatggacacagacgatccgcgacgtggacgtcacgatacccgtctctgcgaacctgaagggacgcgatctggacgtcgtgctcaaaaaggacagcattaaggttaaggtcaagggcgagaacggggaggtctttattgacggccaatttccgcaccccatcaaaccgtctgagtcttcctggacgcttgaaacaacgtctaaacctcccggcaaggaagtcagcatccaccttgacaaagtcaaccagatggagtggtgggcgcacgttgtcaccaccgcgccgaagatcgatgtcagcaagatcacgccggagaactcgagtctgagcgacctggacggtgagaccagggcgatggttgagaagatgatgtatgatcagcggcagaaggagatgggagcgccgaccagtgatgagcagaggaagatggatattttgaagaagttccagaaggaacatcctgagatggacttttcgaatgcg

SEQ ID NO: 28121 - DNA, 636 bp, Emericella nidulans
atggcttcaaagtttctacgagagtacaagctggtcgtcgtcggtggtggtggtgttggaaagtcatgcttgacgattcaattgatccagagccacttcgtggacgaatatgacccaacaattgaagattcataccgcaagcagtgtgtcattgacgatgaggtcgctctgttggatgtcctcgataccgccggacaggaagaatactctgccatgcgcgaacaatatatgcgaacgggcgaaggcttcctcctggtctactccatcacatcgcgtcaatcctttgaagaaatcatgacattccaacaacaaatcctccgcgttaaggacaaggactacttccctatcattgtcgtcggcaacaaatgcgatctcgacaaggagcgagtggtatccgaacaagagggcgaatccttggcacgacagttcggctgcaagttcatcgaaacatccgcgaaatcgcgcatcaatgtcgaaaacgctttttacgaccttgtgcgtgagatccgccggtacaacaaggagatgtccaacccatctggatccggtgcattcggcgccccgcgccccgacagcaaaatggacgtaagcgagcctggtgagagcgccggctgctgcgggaaatgtattgttatg

SEQ ID NO: 28122 - DNA, 653 bp, Emericella nidulans
catcccttctccttgcgtgctcagccgtcacggctttcgctgctccttctgaccagagtatcgctgagcgatctctgtccgagcgttctactcccagctccactggtacaagtggtggctactactactccttctggactgatggtggcggtgacgtgacctacaccaacggcgatggtggctcctacactgtcgaatggaccaaagtgggcaactttgtcggcggaaagggatggaacccaggcagctctcagaccatctcctactccggctcctttatacctagcggtaacggctacctctccgtctatgggtggacccagaacccgctgatcgagtactacattgtcgagtcctacggcgattacaacccaggcacggcaggaacacaccagggaactctcgagtcggacggctcgacctacgatatctacactgcgactcgtgagaacgcaccctcaattgagggtactgccaccttcacgcagttctggtctgttcgccagagcaagcgcacctcgggcagcgttaccacccagaaccactttgacgcatggtcgcagcttggcatgactcttggaactcacaactaccagattgtggctgttgagggataccagagcagtggatctgcttctattaccgtttcctaa

SEQ ID NO: 28123 - DNA, 769 bp, Emericella nidulans
agctctaatcaactgcgacatgggagaagcgtacgggaactggacttgtgggccggatctagagcttctcccgttaattgacatagccaacatcgcgtgtggtttccacgctggcgatcctttgatcatgatggaaacagtacggaactgtaaagcccacaatattttggtgggtgcccatcccggcttaccggacatccaagggttcggacggcgcgaaatgaagctatccccggaagagctcactgcgatcactatctaccaagtgggagctctccaaggcttcctggatcgcgaaggggtgcgcctgaaccatgttaagcctcatggtgtcctttatggtatgatgtgcagggattatgaggtggcaaaggccgtcatgctggggattcccaagggatccctgtgttcggcttaccagggaccaacatggaaaaggctgccaatgatctgggaattgaatttcgagctgagttctatggtgatgtcaagtacgactctaacggaatgcttgtcattgaccgcaagaagaagccatgggaccctgcggatgtggagaagcatgtccggcaacagcttgaggatcagtctgtcacgagcgttgatggagttgtcgtgccgctgccgattaaagattatgatgtgtccatttgttgtcattccgattcgcctggctgtcttgaaatcatcaagacaacgaagaaagtggtggacgaattcaataagaagtatggattttgaacgattgcgtacatttcactcaatctaa

SEQ ID NO: 28124 - DNA, 781 bp, Emericella nidulans
tgtcctcctccgataattaccgtctcgatggaaaagtcgctctggtaactggggctggccgcggcatcggagcagccatcgccgtagccctcggtcagccgggcgcgaaggtcgtcgtcaactacgctaactcccgtgaggccgcagaaaaggtcgtcgacgaaatcaagtcgaacgctcagagcgccatttccattcaagccgatgtcggtgaccctgatgccgtcaccaaactgatggatcaggccgttgagcacttcggatacctggatatagtctcatctaacgcgggaattgtctcgttcgggcatgtcaaggacgttacgccagatgaattcgaccgagtatttcgggtcaacacgcgcggacagtttttcgtcgcccgcgaggcgtatcgccatctgcgtgaaggcggacgcatcatcctcacaagttccaacacagccagcgtcaaaggcgtccccaggcacgctgtgtactcgggctctaagggggcgattgacacctttgtgcggtgcctagctatcgactgcggcgacaagaagatcacggtcaacgcggtcgctcccggcgccatcaagaccgatatgtttctatccgtgtcgcgagagtatatccccaatggggagacttttactgatgagcaggtggatgagtgtgccgcgtggctgtcgccgctaaatcgggtcggattaccggttgacgtggcccgggtggtcagctttctagcttcagatgcggccgaatggatcagtggaaagattattggcgttgatggggg

SEQ ID NO: 28125 - DNA, 781 bp, Emericella nidulans
tgtcctcctccgataattaccgtctcgatggaaaagtcgctctggtaactggggctggccgcggcatcggagcagccatcgccgtagccctcggtcagcgcggcgcgaaggtcgtcgtcaactacgctaactcccgtgaggccgcagaaaaggtcgtcgacgaaatcaagtcgaacgctcagaccgccatttccattcaagccgatgtcggtgaccctgatgccgtcaccaaactgatggatcaggccgttgagcacttcggatacctggatatagtctcatctaacgcgggaattgtctcgttcgggcatgtcaaggacgttacgccagatgaattcgaccgagtatttcgggtcaacacgcgcggacagtttttcgtcgcccgcgaggcgtatcgccatctgcgtgaaggcggacgcatcatcctcacaagttccaacacagccagcgtcaaaggcgtccccaggcacgctgtgtactcgggctctaagggggcgattgacacctttgtgcggtgcctagctatcgactgcggcgacaagaagatcacggtcaacgcggtcgctcccggcgccatcaagaccgatatgtttctatccgtgtcgcgagagtatatccccaatggggagacttttactgatgagcaggtggatgagtgtgccgcgtggctgtcgccgctaaatcgggtcggattaccggttgacgtggcccgggtggtcagctttctagcttcagatgcggccgaatggatcagtggaaagattattggcgttgatggggg

SEQ ID NO: 28126 - DNA, 810 bp, Emericella nidulans
ctttggccctctgcgcctcaatcgcggctcttcccactcagcaaaccccgttgccgttggaggacccgatcaagtctcctttccccatccaccacagctgcaatgccaccgaacagcgccagctagccaccgctctccaggagaccgtgacccttgctgagcacgccaaagaccatatcctccgttggggcaatgagagcgccatctatcgcaagtactttggcgacaggccctctctaaccgccatcggagcatacgacatcatcgtcaacggaaacccagataacatcctcttccgctgcgataaccccgacggcaactgtgctcttgagggctggggtggccattggcgcggcgagaacgccagcgatgagactgtcatctgcgaactcagctacaccactcgtcggtccctgagcacaatgtgctcgcagggatacaccatctctgagtgggagacgaacaccttctgggctggtgatttgctgcaccgactgtaccacatgcctgctataggacagggcttggttgagcactacgcggatggatacgagggcgttttggagctggcggaggggaaccggacagaagctgtgcatgactcggagacccttcagtactttgcgcttgaggtgtatgcatatgatgttgcggtcccaggtattgggtgtgttggtggagaggaagagaatgatggccagggtgaagaacagactgaggagcctgctcaggatgatcagcaggatgaggcggctgaggaggagattcctgagaattgccatactcatgaaggtggagagctgcactgca

SEQ ID NO: 28127 - DNA, 922 bp, Emericella nidulans
tccaacacaccgtcgtggaccatgggtcccggaggaggaccagctgcttctccaactagtgcgcgaacagggcccaaacaataactgggtccgcatctctcaacacatgcactatcgctctcccaagcaatgccgggaacgttaccatcagaatctcaaaccgtcactaaaccgcgaccccatctctgccgaagagggcctggcaattgagcggatggtcaacgaaatgggccgctgctgggctgagatcgcacgccggctagggaatcgcagcgacaacgccgtcaagaactggtggaatggcaacatgaaccgcaagaagagaggtctccaacaaagcatcaacagctctccacactcgagaacgccccacggccgcatcgaagctccataccaccgcgcctctatcggaggcaccagtcccattttccgctctcggctcccctccgtctcctacgacagaccctatacctcatggacctctcgatcccctatatcctctcggcgcgagtctttctcaactgcctccacgttctcccgacaactcacgcccatctacacacttcctgctctcaaccgccctgttgaagcgcccttgacctcgcccgccttctcagatacctccaacgctccgtccctcgacccaccgtcgatggtctcggaccataactcggtttcttctgcctcgcctcgcactcttccttcgccacagcttcactctctccctcctttggtagatacacgctacccatatggagaggtatccaggccccaaacatcagacgatgtgtacttctccagcttccccggcaagtcttcaggactattttcagatccaaagccacgatgggctcctgagcaacgaccgtgctgggcttccgaggaaaaggtcgagcctcggcgtgactcgcggatgggcctc

SEQ ID NO: 28128 - DNA, 947 bp, Emericella nidulans
agggccctggacgccctacaatcctttatcgcactcacagactccagtagcgccacatcccctcggtacattgccagcatcattacgaacgctacgtccagcccacatacgtacgtcttcgctgagctgctcgaacggcccgcagtccaagcactccggtctccagacacccccgccgaatttcagagctacctaaccctccttgagatcttcgcctggggcacatggcaagactaccagcaaacgcctaaccttccaccattgagcgaagagcaagcccgcaagcttcgcctactcaccctcctatctcttgcctctacgataaaacccctcacctacgaagctcttatgacctcactctccctctccgcaccatctgaacttgaatcacttgttacaacagcgatctactcttcacttataacgggtcgcctttcgccagctacaaacccacccacagttaacgtaacgtccgtcgcgccactgcgcgacgttaaacctagctctcttccaacgatgatctccaccctcacagcctgggaagcccgctgtggctccgtaatctccgatattgaaacagaaatagctaaaatcagagctgattctgcacagcgccgtcaaaaggaacatgcgcgtgctgtggccatcgagaagacactcgagaagtggaatgccgagggtggggagcaactacaaggcggaaaccctggtcagggtcagggtcagggtcagggcggtctcgggaagaatgcgggatggaaacccagagatctgagtacggcaatgttcgagagagggttcttcgggggtgggagtaacaagcgggagtttgatgatgatgggtacttcgatggaggatcgagcgattttgatcagcatggttctgggatggatatcgatgagggtgctggggctagggcttctggagctaggcattcgaagcgttt

SEQ ID NO: 28129 - DNA, 955 bp, Emericella nidulans
tggaaaactaccagaagattgagaaaattggcgagggaacgtacggtgtcgtttacaaggctcgcgaactcactcacccaaaccggatcgttgcgttgaagaaaatccgactggaggctgaagatgaaggcgtacccagcactgcgatccgcgagatctctttgctaaaggaaatgaacgacccgaacatcgtacgtctcttgaacatcgtacacgcagacgggcacaagctctacctcgttttcgaattcctcgacctcgatctcaagaagtacatggaggcactgccggtcagtgagggtggacgcggtagggctttgccggatggctctactctgagcaggaatctaggcctgggagatgcgatggtcaaaaagtttatggcacaattaatcgagggtatccgtttctgtcacagccacagagtgcttcaccgtgacttgaaaccccagaatctcctaattgaccgtgatggcaatctcaagctggccgattttggattggcaagggcattcggtgttcccctccgaacctacacgcacgaggtggtaactctatggtaccgctctcctgaaatccttctcggcggtcgtcagtactccactggtgttgacatgtggtcttgtggtgctattttcgcggaaatgtgcactcgcaagcctctatttcctggtgactcggaaattgacgagatctttaagatcttccggatcctcggaactccagatgagactatctggcctggcgtcacctcgttccctgatttcaaaccgaccttccccaagtggaagcgcgaagatatccagaacgtcgtccctggcctcgaagaggatggccttgatctattagaagccctgctcgagtacgatcccgctcgacgtatttcagccaagcaggcttgcatgcatccatacttccagcacggcagctcgtactattctggtcgcgctcgccg

SEQ ID NO: 28130 - DNA, 1028 bp, Emericella nidulans
caatgggcccaagtggtcgagaaggcaggcactcctccggtttacaaacaggttcccgttccaaaacctggaccagacgagattttggtcaagatgcgatattcgggcgtctgccatacagatcttcacgccatgaagggcgactggcctcttccttcaaagatgccactgataggcggccatgagggcgctggtgtcgtcgttgctaagggagaattagtcaaggacgaagatttcaagattggtgacagagccggcatcaaatggcttaatggctcctgcctctcctgcgaaatgtgcatgcaagccgacgaacctctttgccctcacgcctcgctatccggatacaccgtcgatggcacattccagcaatacactatcggaaaggctgcattggcttctaagatcccggataacgtgcctctagacgcggcggctcctatcctctgcgctgggattaccgtatacaaaggactgaaagagtccggagcgcgtccaggccagactgtcgctatcgttggtgcgggaggtggcctgggttctctggcacaacagtatgccaaagcaatggggttacgcaccatcgctattgattccggtgacgagaagaaagccatgtgcgagcaattaggagctgaggtctttatcgatttcagcaaatccgccgacgtcgtcgcagatgtcaaagctgccacgccgggcggcctaggcgcccacgccgtcatcctcctcgccgtcgccgaaaagcccttccaacaagcaaccgagtacgttcgctcccacggctccgtcgtcgcaatcggcttgccagccaatgcatttctcaaggcacccgtgttcacaactgtcgtccgcatgatcaacatcaagggaagttatgtcggaaaccgccaggacggcgttgaggcgttagacttctttgccaggggccttatcaaggcgccattcaagaaggcaccgctgcaagatttgccacagatttttgagttgatggggcaagggaagattgcgggtcgttacgtcttgga

SEQ ID NO: 28131 - DNA, 1030 bp, Emericella nidulans
tgcccgcaaacctcaaaatcggtatcccaaccgtgtccctgtcaaaaccgggcctgcactctcttgaccataagctccgctcggccgctcatggcttcgcggggatcgagctgtttattgatgacctctcccatttcgcctcatcgtcattcaatggctccctcactcaagcggcaaagtatatctcctcgctcgccaagcaacttaacctcacatttatctgcctgcaaccattcggtttctacgagggtctggtggacacaaatcagtcgacgtacctgctcactgagaaactcccgctctggtttgcgatcgcccgcattataggcacagatctcatccaaatccccgcaaatttcctccagaatgaccctgtcaccggggctgcacgaacaagcggcgacataaggcttatcgtctcagatctgcagacgatcgcagatatcggtgtaaagcagggcttccgctttgtgtacgaggcgctctgctggtcgacgcatgtcgatacatgggaagcagcgtggaatgtcgtcaagctggttgatagagagaatttcgggatctgcctggatagcttcaacacgcggaccccgcttccgtcactgggaagacgccggatgctgagcaagccgtggccaagtccatggagacgctccgttctctcgtctccagtggagaactggacatcaggaaaatcttctacatccagcttgtcgatggcgagcggttgtcggcgccgctggacgagaagcacccctttcatgtggagggccaacccccgaagaatgagctggagtcgcaatgcgcggttattcccctgtgaagaggagaggggtgggtatcttcctgtgttggagatcgcgagggcgttctttgaaatcgggttcgaggggtgggtgagtctagagctgttttcaaggacgtgtaatgatcccgatgtgaacacggtgggggagcatgcgagacgtgggatggatagaaggaggagggttgttgcggcgctaggactcgatgttgaggtgccagcacg

SEQ ID NO: 28132 - DNA, 1067 bp, Emericella nidulans
gccacggcgaacacctcaacagctgcaagcaacaccaccggggacatctcgaaggacgtcgctctcaactccccacccgaggacagtatctcagatctacgtttttctcctgcgagtgaacatctggccgtagcgtcgtgggacaagaaagtccgcatctacgaaatcaacgagcagggtcagagtgaggggaaagctctttttgagcatgaggcccccgtcttgaactgctgctggtcacctgacgggacaaaggtcgtcggagcgggtgcagacaaggcggctcgtatgctcgatctcgctgccaatgctactgcgcctattcaggtcgccgctcacgacgccccgatcagatgttgccacatgatcccaaatccggccggtggcacgcctctcctcgtgacgggctcctgggacaaacaggtcaaatactgggatttacggcagtcaactcctatcgcttcgttagagtgtcaggaacgtgtttacacgatggatgtcaaggataaactgctagttattgggacggcggaccggtacatcaatatagtcgacctcaataaccccacaaaattctacaaaaccatgcagtcacctctgaaatggcaaactcgggtggttagctgcttcacagacgcaaatggttttgccgttggaagtatcgaaggccgctgtgctatacagtacgtcgaagacaaggattcgagctcaaacttcagttttaaatgccatcgcgaaacaccgcccaaccagcgtgatatcaacaacatctactcggtcaacgccatttctttccaccccgttcacggtaccttcagtacggccggtgcagatggcacttttcacttctgggataaggatgccaaacatcgtcttaagggatatcccagcgtcgggggcacaatttcaagtactgccttcaatcgcacaggcaacatattcgcctatgccgtgagctacgactggagcaagggttactcggcgaacaccccacagcttcccaacaaagtcatgcttcatccggttgcgcaggaagaagtgaagccaaggcagaacgctaggaggcg

SEQ ID NO: 28133 - DNA, 1086 bp, Emericella nidulans
ggctgctcctgaaatccccaagaagcaaaaggctgtcatctacgacaaccccggtaccgtctctaccaaggtcgtcgagctggatgtacctgagcccggcgacaatgaagtcctgatcaatctcactcattccggcgtttgccactcagattttggtattatgaccaacacgtggaagatactacccttccctactcagcccggacaagtcggtggccatgaaggcgttggcaaagtggtgaagctcggcgcgggcgctgaagcatcaggattgaagatcggggacagagtcggtgttaagtggatttccagcgcctgtgggcagtgccctccatgccaggacggcgccgacggcctctgcttcaaccaaaaggtatcaggttactacacccctggcacattccagcaatacgtgctcggtcctgcgcaatacgttaccccaattcccgatggcctcccatcagccgaagcggcgccccttctctgtgccggtgtcacagtctacgcttctcttaagcgcagtaaagcccaaccaggtcaatggatcgtcatctccggcgctggcggcggccttggccacttagccgtccagatcgcagccaagggcatgggcctgcgtgtgattggcgttgaccacgggagtaaagaagagctcgtcaaggcgtcaggcgccgagcacttcgtggatatcaccaagttcccaacgggcgataaattcgaggccatctcctcgcacgtcaaatcgcttacaacgaagggtcttggtgcgcatgctgtcatagtttgcacggcgtccaatattgcttacgctcagtctttgctcttcctccggtacaacggaacgatggtctgcgtgggtatccccgagaacgagccgcagcgtatcgcaagtgcgtacccaggcctgtttatccagaagcatgtgcatgtcactgggtcggctgtcggaaataggaacgaggcgattgagactatggagtttgcggcgaggggtgtcattaaggcgcacttccgggaggagaagatggaggccttgactgaaattttcaaagagatggaggaggggaagttgcaggggcgggtggt

SEQ ID NO: 28134 - DNA, 1101 bp, Emericella nidulans
gtccggcgatttgccacagctgccctgcgcagcgctgctgagagcccatacaatgtccgggtttcccaggcgcaaggtttcgtcaacggactgaccgaaaaagcaattggcaacacgccccttatccgccttaagcgtctctctgaagaaaccggttccaacatcctcgccaaagctgagtttcagaaccccggcggcagcgtcaaggacagagccgcattatacgttgtcaaagatgccgaggaacggggccttctaaagcccggcggcaccgtcgttgaaggaacagcgggcaacacgggtattggactcgcccacgtctgccggtccaaggggtataagcttgtcatctacatgccgaacacgcagtctcagggcaagattgatcttctgcgattgctgggtgcggaagtgtacccagtccccgcagtggcgtttgacaaccctgagaactacaaccacaaggcgcggcggcatgcggagtcgctagacaatgcggtgtggacaaatcagttcgataacacggctaaccgccgagctcatattgagacgacgggcccggagatttgggcgcagacgggcggaaagctggatgcatttacgtgctcgactgggacaggtggtacgctcgcgggaatcacatattacctgaagcaggctagcggcggccgtgtcaaatctttccttgcggatccccctggtagtgttcttcacagctacattcagagcggtgggaaattggtggagcggtctggtagcagtatcactgaggggattggccagggtcgtattacggataatctgcagcctgatgtcggcactttggatggatcgctcaatattagcgacgagaaaaccattgagatgatctaccgctgcttggatgaggaaggcctctacctaggcgccagctctgccctcaatgttgttgctgctaaggaagttgccgagaagctgggcaagggcagcaccgtcgtgaccatccttgctgatggtgcgtaccggtatgcggacaggctcttctccaagtcatggcttgagagcaagggtctgcggaacgctatccctaagcatctagagaagtacattgttcttccttga

SEQ ID NO: 28135 - DNA, 1112 bp, Emericella nidulans
cagcctgctgaccggccactttggtgccctcaaacaaaccatcgatggcatgccgcccaacgcaaccctgcatagcattatgctgaaattgtcgcaaaagttccgctcagggatgttctacatcaacatgtggccattcagcggtacatggctcgtggtcgcaacaccgtctggcgcggcccagatccagagtctgaatctttcgaagccgccgctggtgcgaagaccgctggagactatcaccgggggcccaagcttgatgagtatgcatggtgaaacatggaaacggtggagggcactgtttaatccaggctttaaccccaactacttgattgggctggcgccgctgatcgccgatgaggtcgttgttttttgcgagcagctacggcagaaggccagaacaggaacagttttccagcttgaaccgctcactctgaggttgacagttgatacgatttgctctgtgacgttgtatgtggttactcccgttgggcgatggccctttctaacccctgacttagagattcacagctccaccaccaaactcaggaccacccccttgcctcagcgctgcaacggcagatcgaatgggcctcgtttggaactaccttcaacccctttaaggcggtacctgaccgtgcggcctctggtgatgtggtacaataaccgccttatgaaccgcttcatcgaccaagaggttgaccgagcgtaccgggagcagtctggccgtcagtcgaaatccgtgatctccctcgccctcagagattacatgaaagagaaagatggaagtctggaagacttcaaacgacgtgttgcgccacagttacgggtctttctcttcgcaggtagagatacaacgagcagtacactgctctatgcattctacctgctttcccgacatccagaggccctagctaaggtgcgcttagagcacgaccaggtcttcggcccatatcatcaacaagtacacgagaaaatccaccaagatgcgaaactcctcaaccaactcccctacacaacagctgtccttaaagagactctgaggctcttccctccgtctgcctccatgcgtgaagcggacccggcgttgaaatcaccgacgacaacggcca

SEQ ID NO: 28136 - DNA, 1136 bp, Emericella nidulans
caaagttgcagcagcggccttcggcttgtctgccgtagcatctgcgatgcccgcggctcctcctcgccagggcttcacgatcaaccaactcacgagggcgattcccaaacgcaccatcaaccttccagcgatttacgccaatgcattgtccaaatatggcggcaatgtccctccacacatccaggatgctatggctcatggtagtgctgtgaccaccccggaacagtacgacgttgaatacttgactccagtcgctgttggtggcacaacaatgaacctagactttgacactggatccgcggacctatgggtgttttccaacgagcttccgtcttcccagactacaggccacagcgtctacaaaccatccgataatggaaccagaatgtccggatacagctgggaaatctcatatggcgacggcagcagtgccggtggtgatgtttacagagacaccgtcaccgttggtggcgtcactgcgccagggcaggcagtcgaggccgcttcacacattagtgaacagttcacccgggatcaaaacaacgatggcttgctcggtttagcattcagctccattaacactgttcaaccgaaatcccagaccaccttcttcgacagcgtaaagtctcagcttgaatctcctctgtttgctgtaacacttaagcaccaggctcctggttcctacgatttcggctacatcgaccaatcaaaatacactggcgagcttacctatacagatgtggacaattctcagggcttctggatgttttccgcaactgcaggggagactgactttgacgccatcgcggataccggcacaaccctcattatgatcgaccagtctatcgcagaggactattactctcaggttccactcgccttcaacaacttcttctacggtggttggaccttcccttgctccgccgaactcccgtccttcactgtcaccatcaacggctacgacgccgttgtcccaggcgagcacatcaagtacgcccccgttaccgatggctcctctacctgcttcggaggtatccaggataaccagggcctcccgttctcaattcttggcgacgtcttcttgaaaagccagtacgttgttttcgactcggagggccctcagttgggcttcgcgc

SEQ ID NO: 28137 - DNA, 1148 bp, Emericella nidulans
tggcggctaccgaaagtgcgttgacgatacacaatgatatctcaatggagctgcctgaactagcccccaatcaaggtctagaggccttcaaagatattctttttggatcagctgcaggaatgataggcaaggtcattgaatatccctttgacacggtcaaggttaggcttcagtcacaaccggatcaccttcctctccgatacaatgggccgttagattgtttccgtcagtcattccaggcagagggtcttcggggtctctatcggggaatcagcgctccgatggcgggagctgctgtagagaacagctgcttgttcttcagttaccgtgtggttcaagagctacttcaggcctcgtactattcctcgacagagccgttaccgttaactgctttggtgttcagcggtgctgcatccggatccatcacctcccttgccttgacaccgatcgagctcatcaaatgcaagatgcaagtgccctcggagccttccagcgcacgagtgggacccctcaagattatagtctctgttttccgccaggacggcgtcttggggttctggcgcggccaactgggtacgcttatccgtgagacgggcggtggtgctgcgtggtttgggggttacgaaggggtgtcagcacttttccgttcataccattattcaccttcgacaaccttttcctctgaggtcgaatctgggtcactccctctttatcaacagatgttggccggagcagcagccggtgtcagctacaatttcctcttttatccagccgacacaataaagtcgagattgcagacagaagatatcaacaacacatctagcaaacgacagacattcgggggcgccgctaggctctctggcatgagcaaggacttcgcggcctatatcgaggctgtggtatcacttgtgcgcggtctgccgcaagctcggcattcatttttacactatttgaaggcctacggagttactttggatgagcgaattcgttatgtgattagatttgattttgattctcgacgattttttggcccatttctgcttattgatgatacctatgatttgtctagacttagattttcttgtttgatcattcgtctgttcaaccaactggcattggggccgcggtcaaaagtccgttggaggaaa

SEQ ID NO: 28138 - DNA, 1220 bp, Emericella nidulans
ttgccaatatgttcaataagctgtcggggcagcccgagagctacgagaagaagtcgctgtatcgatttggacgaaccctcggtgctggaacatatggtatcgtccgcgaagcagactgttcttccgggaaggttgcggtaaagattatcctgaagcgcaacgttcggggtaacgagcgcatggtctatgacgagctggatctgctgcaaaagctgaaccaccctcacattgttcacttcgtcgattggtttgagtctaaagataaattctacattgtcacacaattagccactggtggcgagcttttcgatagaatttgcgagtacggcaagttcacagagaaggatgcgtcacaaaccatccgccaggtgctcgatgccgtcaactacctacatcaacgcaatatcgtccaccgagacttaaaaccagaaaaccttctttaccttacccgtgatctggactcgcaactagtcctcgccgactttggaatcgcaaagatgttggataacccagccgaagtgctgaccagcatggcggggtcattcggttatgccgctcccgaggtcatgctcaagcaaggacatggcaaagctgtggacatctggtcgctcggtgtcatcacatacaccctgctatgcggatactcgcccttccgatccgagaacctgaccgatctcatcgaggagtgccgctccgggcgcgttgtcttccacgagcgctactggaaggatgtctccaaagatgctaaggatttcattctcagcttgctgcaggtggatccggcgcagcggcccacgtccgaggaagccctgaagcacccctggttgaagggtgaatctgccagcgaccgcgacttgctacccgagatccgcgcgtacattgctcgctctcgcctcaagcgaggtattgagatcatcaagcttgcgaaccgcatcgaagcgctcaagatgcaagaagaagatgaagaagacattcccagtgcagttgacgtacaggcttcggaagcgtctgacaagtccggtctatcaccgttccctgctctttcaacagagaacagcaacacacaccctgcatcaaccggtaatggagaatcaggcggtactaagaagcgcagcttaagcaagattgcgcgaggtgctatcttccgtgaggtcgtcctcgccaaggtgcgcgagatgaaggaaaacgaggagcgagaaaaggtcgaacgcgaacgtcgc

SEQ ID NO: 28139 - DNA, 1275 bp, Emericella nidulans
gtccggcccggaggcaactggcgctgatgtatcccaggccattcgcatagcttacttcactccattgaaacatattccaggtccctggtatgcgtcgttgacagggctgcgcctgtcgtggtccgtctttgccaacaatcgaatccactacgtccatagcttgcaccagaagtatgggcccatcgtccgtatcggacctcaagaaatcgacgtggcagatcctgtggcaggacgcgagatccaccgcatgggatctggcttcatgaaagctcccttctatgagcttctatcaccagggccggtagacaatatcttcaactttcgggatccaaagctccatgcggcgcgtcgtaaactttacgcgcggggtttcacgctgcagagcttacgaaacgagtgggagccaaaggtccgggatatcatcaagctgaccgtggagaagatcaaatgcgacgccgtaaagggcgaggccgagatcatggggtggtggactctcatggccaacgaaatagtctgccagcttacgttcggcggtggcgcaggcatcgtcgccaaaggtgtcaaggaacccttcgttcttatgctagaacggcggatgggagaccttgcgcatctgctcaagcacttcgctccccctggctactatcttggccaggccggaaacttgactgatacagatatcataactgacgccggggctctactactggcgggctccgacccgacggcaatctctctgacgttccttctctggtgtgtgctgagtcgaccagaagtccaaaagcaagtcgaggccgaggtcgccactcttgaaggtgaactgaccgacgaagcctgcgagcggttgcccatcctgaatgcggtcatcgacgaaagtctacggctatacggggcggctccaggatgcatgcctcgcagtccaccatccgggggtgtgacaattggggggtatttcattcccgacgacaccatagttgctacgcagaactggagtcttcagcgcaatccgagtatctgggatgatgcagacacgttcgatcatacgcgctggctatccaactcgagaatcactgaccaagccaagctggctttcaacccgttcgggtacggggcacgccagtgcctaggtattcatctcggccgtatggagatgcgtctggctgcggccatgttttttcgcgaatgtgttggggcgcgattaggacgatcggtgacggacgagagcatgcacgtggtagacagtttcatagcgggcgttccccgcgatcgtcgatg

SEQ ID NO: 28140 - DNA, 1291 bp, Emericella nidulans
ccccagcgatcagccagcaatccacacccacggccccggggggaacgcaagggacacgcaaactgcgcgagagttgcatctcgtgctccagatccaaggtcaagtgcaataaggagaagcccacatgcagtcgatgcgtccgccgtggtctgccttgcgagtatatggtttccaggcgcactggacgcactcgcgtcattggtgttgagcagccaaagacagcaccatcaccaacaacaccgacgaatacgacagcagctactacagcaacgaaggcaggaccaccagttacaacagacagtgctgttcatacacctgtcattactacggcgccctctcccaagccggtgcagatccagtctcctccagccgaaccagatctctggggcgccatcctgtctccgaatacttccacctccaccgacctatcgtcactcctctcggtgaatacaaatttcagtcagctcttcgcctcgctttctccttcgcttcttgagggtatggatggcatggatgccgaaatgcacgcgccggagctgggcgcattgtcggtcgccgacccatcgtcctccatgatgcaggggttagaggcccctaacgctgcccaaccaccgtcttcgaacaccacaagccactcctactgcctgtccatctgcctggatactctcatgcggctctttccgaatgctggcgctaactgcgagcgacccgggcacgagagcaaccccggcaaactgttcactatcgagtccgttattgaggacaacaaacaaatcttggacacagcgcagacaatcctggcttgccgctgcgccgaggatgagtacgtggtcactctcgtctcacttattgtcttcaaggttcttggatggtacgtcgccgcggctcgggataggtcgtcggacccggggcgcgaagaagacttcaactggtcgactgcccaagacagtcgtagaggttcggtctcttcctttgaggagcaggtgctgcatcttcccaccgtcgtcggcacttattgcattgatggccatcatcagagccgcatggcagcccagctggtgctgagcgagctataccgcgtccaacgactggtgactcaggtaagccgtcgcctagaatctattcgccgccgctcctcgagcagctcgagctctgcctctagtaatacaacggactctgacggcgggatgtcgacccccttgtcgtcgaccaccctggtccatctagaagacgatttgcgcaagcgcctgcgtgccgtctcaagcgaaacgatcagcatcctccgccacgc

SEQ ID NO: 28141 - DNA, 1368 bp, Emericella nidulans
tttttcacggtcgctctttcgctttattacttgctatcgagagtctctgctcaggccccagtggtccagaatcattcatgcaatacggcggacggtggatatcaatgcttccccaatgtctctcatgtttggggtcagtactcgccgtacttctccatcgagcaggagtcagctatctctgaggacgtgcctcatggctgtgaggttacctttgtgcaggtgctctcgcggcatggggctaggtatccgacagagtcgaagagtaaggcgtactcggggttgattgaagcaatccagaagaatgctacctctttttggggacagtatgcttttctggagagttataactataccctcggcgcggatgacttgactatcttcggcgagaaccagatggttgattcgggtgccaagttctaccgacggtataagaatctcgccaggaaaaatactccttttatccgtgcatcagggtctgaccgtgtcgttgcgtctgcggagaagttcattaatggatttcgcaaggctcagctccacgaccatggctccaaacgtgctacgccagttgtcaatgtgattatccctgaaatcgatgggtttaacaacaccctggaccatagcacgtgcgtatcttttgagaatgatgagcgggcggatgaaattgaagccaatttcacggcaattatgggacctccgatccgcaaacgtctggaaaatgacctccctggcatcaaacttacaaacgagaatgtaatatatttgatggatatgtgctctttcgacaccatggcgcgcaccgcccacggaaccgagctgtctccattttgtgccatcttcactgaaaaggagtggctgcagtacgactaccttcaatctctatcaaagtactacggctacggtgccggaagcccccttggcccagctcagggaattggcttcaccaacgagctgattgcccgactaacgcaatcgcccgtccaggacaacacaagcaccaaccacactctagactcgaacccagccacatttccgctcgacaggaagctctacgccgacttctcccacgacaatagcatgatatcgatattcttcgccatgggtctgtacaacggcacccagccgctgtcaatggattccgtggagtcgatccaggagatggacggttacgcggcgtcttggactgttccgtttggtgcgagggcttactttgagctcatgcagtgcgagaagaaggagccgcttgtgcgggtattagtgaatgatcgcgttgttcctcttcatggctgcgcagttgacaagtttggacggtgcactttggacgattgggtagagggcttgaattttgcaaggagcggcgggaactggaag

SEQ ID NO: 28142 - DNA, 1377 bp, Emericella nidulans
tgggatcactagaggctggacataggcatagggatcatctccccgctattggttttataggctccagaggtcccaccacatctcctgctcctctcgttagtccgacgacgatgtacccgaataaccctcttccttattcatactcgacgactcccgccaacgttgggcctgggtatgcttcgccgccggagccccggcgcgcggaggatgaaaaagaaaaggcaccacgacagtcgctcccatctatacacgaggcgttagggaatgataatccactaccatatccacctgctccaacatcagcagctcctcaacagccaaacagtgcgccgcctccgcatcacctcccgaactttggacgctcgagtgcggaggggccgtcaggtcctcctaacccgttctccaatggaagctccttcctcagggagtcatcatcatctcaccagccacaattacaggcggaaccatcacgttcaagtttagcgtcactgaatacaacagattccaggaacgcttcacttcagtcaattagctcgggcaaatcgccgacgcaaagtgcaagcactgttatgacctctgtgtctggctcgcaaacagggacaggttacgactacaatgctcctccgtcagcgggcagtgttgcgtcgccaaatggatacagcggattttcacagccctttccgttccagtcacagcccccaccaggagcaccagtgtatccggccgcatcgtacgactcacggccttacgaaatgaagggtggggttacaggttccttcgggcaccagggggattctgcgaagcgccatctcgatgtgtatgacattgaatcgtctctgactgagatggtcgacttgaacactcgggcgctagacttctcacggcattatgcaaacagagcacaccagtctcgctccggtgctgtagtcggatcagctctgccctcgctccatgaggtggaagagatgctcaacatccaacgacggaaccacgacgctctgatgcgcataagagccgtggttttcagccaggaacatgccatggccgagcaagtggcacagcgaaaagccttcaaatttgggggagcccacgatgacgaccaccgtatggcaatgtaccaggaggaattcaagagcagcggcgggttcggccccgactcgaagaaacgacgtggtaaagctgcccctcctggtcgatgccatagttgcaaccgtgccgaaacgccagaatggcgccgcggccccgatggcgcgcggactctgtgcaatgcatgcggcttacactacgcgaaattgactcgcaaaatgggcgccaaacaggcggcagggttggggtcgaacctcaaacccaagacactcgactcggtgtcaccgagga

SEQ ID NO: 28143 - DNA, 1480 bp, Emericella nidulans
gcgccgaggagcagcagaatggagatgacaccgtcattgtcgtactaggtgcctccggggatcttgcaaagaagaagactttcccagctctttttggcctttttcgcaacaagttccttcccaagggtatcaagatcgtcggatatgcccggacacagatggaccacaatgaataccttaagcgagtggatacattaagaccccgacaaaggaagatcgaagagcaattgaacagcttttgcgagctttgcacatacatcagcggccaatacgaccaggatgactcattcaagaacctcgccaagcaccttgaggagattgagaaaaaccaaaaggaacagaacagagtcttttacatggcgttgccccccagcgttttcatcacagtctcagagcaactaaaacgcaactgctaccccaaaaatggtgtcgctcgtattattgtcgagaaacctttcggcaaggacctccagagctctcgtgatctccagaaggcccttgagcccaactggaaagaagaagagatcttccgtattgaccactacctcggcaaggagatggttaagaacatccttatcatgcgctttggcaacgagttcttcaatgccacctggaaccgccatcacatcgacaacgttcagatcacgttcaaggaaccattcggtacggagggccgtggaggttactttgatgaattcggcatcatccgtgacgttatgcagaaccaccttctgcaagttctcacactgcttgctatggagcgacccatctctttctccgccgaagacatccgtgacgagaaggttcgcgtcttgcgcgccatggaccccattcaacccaaggatgtcatcatcggccagtacggcagatcactagatggtagcaaacccgcatataaggaggatgatacagtgccacaggactctcgctgccccaccttctgtgcgctggtcgctcacatcaagaacgagagatgggatggtgttcctttcatcatgaaggcgggtaaagcccttccaaacgaacagaagaccgaaatccgtattcagttcaaggacgtcacttctggcatcttcaaggatatcccccgcaacgagcttgtcatccgtgtccaacccaacgaatctgtctacatcaagatgaactcgaaacttcctggactttccatgcagaccgtggttactgagctggatctcacctaccgtcgtcgattctccgacctcaagattcctgaagcctacgaatctttgatcttggatgctctcaaaggagaccactccaactttgtccgtgacgacgagctcgatgctagctggaggatgttcactcctctgctccactacctcgatgacaacaaggagatcatccctatggaatacccctacggttcccgcgggccctccgttcttgacgacttcaccgcttcctatggctacaagttcagtgatgctgcgggataccagtggccgttgacgcacac

SEQ ID NO: 28144 - DNA, 1492 bp, Emericella nidulans
cagcctgctgaccggccactttggtgccctcaaacaaaccatcgatggcatgccgcccaacgcaaccctgcatagcattatgctgaaattgtcgcaaaagttccgctcagggatgttctacatcaacatgtggccattcagcggtacatggctagtggtcgcaacaccgtctggcgcggcccagatccagagtctgaatctttcgaagccgaacatcctgcgaagaccgctggagactatcaccgggggcccaagcttgatgagtatgcatggtgaaacatggaaacggtggagggcactgtttaatccaggctttaaccccaactacttgattgggctggcgccgctgatcgccgatgaggtcgttgttttttgcgagcagctacggcagaaggccagaacaggaacagttttccagcttgaaccgctcactctgaggttgacagttgatacgatttgctctgtgacgttgtatgtggttactcccgttgggcgatggccctttctaacccctgacttagagattcacagctccaccaccaaactcaggaccacccccttgcctcagcgctgcaacggcagatcgaatgggcctcgtttggaactaccttcaacccctttaaggcggtacctgaccgtgcggcctctggtgatgtggtacaataaccgccttatgaaccgcttcatcgaccaagaggttgaccgagcgtaccgggagcagtctggccgtcagtcgaaatccgtgatctccctcgccctcagagattacatgaaagagaaagatggaagtctggaagacttcaaacgacgtgttgcgccacagttacgggtctttctcttcgcaggtagagatacaacgagcagtacactgctctatgcattctacctgctttcccgacatccagaggccctagctaaggtgcgcttagagcacgaccaggtcttcggcccatatcatcaacaagtacacgagaaaatccaccaagatgcgaaactcctcaaccaactcccctacacaacagctgtccttaaagagactctgaggctcttccctccgtctgcctccatgcgtgaaggcggacccggcgttgaaatcaccgacgacaacggccaagtatatcccactgcagggtgcaacgtctggacgctcaccgtggcactgcaccacaacagtgcgcactgggctgaagccgagtcatttatccccgaacggtggctcgtgggatctgaccatccgctctacccagccaaaggcgcatggagggccttcgagttcggcccgcggagttgtatcgggcagacgctggcaatgttggagctgcgggttgcactagcgatgacgctccgcgagtttgatattgcaccggcgtatgataagtgggatcacatttatccaaatgacgccgtcaaggagttcaatgggcatcgggcatatcaggcagaaaaggggggagggggtgcgcatccggcagatgggatgccctgtctggtt

SEQ ID NO: 28145 - DNA, 1498 bp, Emericella nidulans
gcgccgaggagcagcagaatgggagcactgtcgaactcaaagatgacaccgtcattgtcgtactaggtgcctccggggatcttgcaaagaagaagactttcccagctctttttggcctttttcgcaacaagttccttcccaagggtatcaagatcgtcggatatgcccggacacagatggaccacaatgaataccttaagcgagtgcgctcatacattaagaccccgacaaaggagatcgaagagcaattgaacagcttttgcgagctttgcacatacatcagcggccaatacgaccaggatgactcattcaagaacctcgccaagcaccttgaggagattgagaaaaaccaaaaggaacagaacagagtcttttacatggcgttgccccccagcgttttcatcacagtctcagagcaactaaaacgcaactgctaccccaaaaatggtgtcgctcgtattattgtcgagaaacctttcggcaaggacctccagagctctcgtgatctccagaaggcccttgagcccaactggaaagaagaagagatcttccgtattgaccactacctcggcaaggagatggttaagaacatccttatcatgcgctttggcaacgagttcttcaatgccacctggaaccgccatcacatcgacaacgttcagatcacgttcaaggaaccattcggtacggagggccgtggaggttactttgatgaattcggcatcatccgtgacgttatgcagaaccaccttctgcaagttctcacactgcttgctatggagcgacccatctctttctccgccgaagacatccgtgacgagaaggttcgcgtcttgcgcgccatggaccccattcaacccaaggatgtcatcatcggccagtacggcagatcactagatggtagcaaacccgcatataaggaggatgatacagtgccacaggactctcgctgccccaccttctgtgcgctggtcgctcacatcaagaacgagagatgggatggtgttcctttcatcatgaaggcgggtaaagccctcaacgaacagaagaccgaaatccgtattcagttcaaggacgtcacttctggcatcttcaaggatatcccccgcaacgagcttgtcatccgtgtccaacccaacgaatctgtctacatcaagatgaactcgaaacttcctggactttccatgcagaccgtggttactgagctggatctcacctaccgtcgtcgattctccgacctcaagattcctgaagcctacgaatctttgatcttggatgctctcaaaggagaccactccaactttgtccgtgacgacgagctcgatgctagctggaggatgttcactcctctgctccactacctcgatgacaacaaggagatcatccctatggaatacccctacggttcccgcgggccctccgttcttgacgacttcaccgcttcctatggctacaagttcagtgatgctgcgggataccagtggccgttgacgcacac

SEQ ID NO: 28146 - DNA, 1562 bp, Emericella nidulans
cggcgtcgctcgttcctttccgcggcccttccaggccgtgaccaggcggccttttcgagttgtccagccggccatcgcctgtccgtccaacagccggtcgtttaaccattctcgatcattacgatcaacggggtctcagtcccccgctccatccccacgcgactcctcgaatcccgcgctgtccttcccttgcctcgacgcccaggaggccaagtccgctcttctttccgcgcgatctcttggttcaggccctgaaccctcctataccgccggccaccacgaacgattccattccgacgaaccgctgctccttgattggggcggtttgcttccagaatttgatatcgcatatgagacatggggccagctgaacgagaagaaggataatgtcattctgctgcataccggtctgtctgcatctagccatgcgcacagcaccgaagcgaacccgaagcccggctggtgggagaaattcataggtcctgggaagacgctagatacggacaagtactttgtgatctgcaccaatgtccttggagggtgctacggtagcacggggccctcgacggtggacccgtcggatgggaagaagtatgctacgcggtttcccatcctgacaattgaagatatggtgcgagcgcagttccgccttttggaccatcttggggttcggaaactctacgcgtccgtcggctccagcatgggtggtatgcagagtcttgcagccggtgttctgttcccagagcgagtgggcaagattgtgtcgattagcggttgtgctcgaagccatccgtacagcattgctatgcgccatacccagcggcaggtgttgatgatggatccaaattgggctcgaggtttctactacgattcgatcccacctcattcaggcatgaagctcgctcgcgagattgccaccgtcacgtaccgcagcggaccagaatgggagaaacgctttggtcggaaacgggctgatccgagcaaacagcctgcgctttgccccgactttctcatcgagacgtatctcgaccacgccggtgaaaaattctgcttggaatacgatgccaacagcctgctctacatctccaaggcgatggatctgtttgacctagggttgactcagcaactcgcgacgaagaagcagagggcggaggcccaggcgaagattagcagcggaacaaacactgtcaatgatgcgtcgtgcagccttacacttcctgaacagccataccaggagcagccatctgcctcgacatccgccgagcagtctgcttccgcttcagagaccgggtcggctccgaacgatcttgttgccgggcttgcgccgctgaaagaccatcaggtgctggtaatcggagtcgcaagcgacattctcttcccggcgtggcaacagcgcgagatcgcggagactctgattcaagcagggaacaagaccgtggagcatattgagctgggcaacgacgtgtctctctttggtcatgacacattcctccttgatgtcagaacgtcggaggcgcagttcgcaagttccgtactagtcggctcgcacataattgtacaat

SEQ ID NO: 28147 - DNA, 1575 bp, Emericella nidulans
ggcacccaggtgtccaccctagaacgtgttgtcaaagaggtgcaagcacccgccttgaacaaaccatcagacgatcagttttgggaccccgaagaaccaacgaaacctaatctccagtttctcaagcaacacttctatcgggagggtcgccttaccgaggaccaggcgctatggattatacaggcgggtactcaaatcctgaagtcggagcccaacctgctggaaatggacgcgcccataactgtgtgcggtgatgttcacgggcagtactacgatctgatgaagctgtttgaggtgggaggagaccctgctgagacgcgttatcttttcctgggcgactatgtcgatcgaggctacttcagtattgagtgtgtcctgtacctatgggcactgaagatctggtatccgaatacactctggttgcttcgcggcaaccacgaatgtcgacacttgacagattattttactttcaagttggaatgtaagcataaatatagcgagcgcatctatgaagcctgcattgagtcgttttgcgcgctgccgctggcggcggttatgaataagcagttcctctgtattcacggtggtttgagccctgaactgcacactttagaagacatcaaatcgatcgatcgattcagagaacccccaactcacgggctcatgtgcgatatcctctgggccgatcctttggaggacttcggtcaagagaagactggcgactactttattcataatagcgttcgagggtgctcctactttttctcataccctgccgcgtgtgctttcctcgagaagaacaacttgctctcagtcattcgagctcacgaggctcaggacgcgggataccgcatgtaccgcaagacgcggactacaggatttcccagtgtcatgaccattttcagcgcaccgaactacttggatgtatacaacaacaaagccgccgtcctgaaatacgagaacaatgtcatgaacatccgacaattcaactgcacccctcacccttactggcttcccaacttcatggatgtgttcacctggtctctgccgtttgtcggtgagaagattaccgacatcgttattgccattctcaacacttgctccaaggaagagcttgaagacgagacaccctctaccatctcccctgccgagccgtctccaccgatgccgatggacacagtggatacagagagtaccgagttcaaacgacgtgctatcaagaacaagattctcgccattggccggttgtctcgagtcttccaagtgctgcgtgaggagtctgaacgtgttacggaacttaagaccgcggctggaggtcgacttcctgccggtactttaatgcttggtgcggaaggaattaagcaagccatcacgaactttgaagatgcccgcaaagttgatttacagaacgaacgtctcccgccttctcacgatgaggtcgtcagacgaagcgaagaggaaagacgcatcgcccttgaccgcgcccaacacgaagctgataacgatactggccttgccacagttgcaaggcgcattagcatggtccgtcggatcaggaaaatcccgtcgacaacg

SEQ ID NO: 28148 - DNA, 1642 bp, Emericella nidulans
agtcccccgtcggccaagagcatggaggagggtcgcaccccgtccgtccagtacggatatggagaccccaagacattggagggagaaatagaagagcacacagcaactaagcgtggtctgtcatcacgacagctgcagctgctcgccatcggaggatgtattggcactggtctcttcgtcggtacttcgacagtgctgacccagacgggtcctgctcctttgctgatgagctacattgtcatggcctctattgtctggtttgtcatgaacgtcctgggcgagatgaccacctacctgcccattcgcggtgtctcagtaccgtacttgatcggccgcttcaccgaacccagcattgggtttgcttccggctataactactggtattcatttgctatgctgctggcctcggaagtcactgcctcggggttgatcattgaatactggaatccgcccgtcagtgtcggtctgtggatcgccattgtccttgttgtgatcctggccctgaacgtcttcgcggtcgagtggtacggagaatccgagttctggttcgctggtctgaaaatattggccatcatcggtctgattatcctgggcgttgtgctgtttttcggtggaggcccaaatcatgaccgcttagggttccgctactggcaagaccccggtgcattcaatccgtacctggttcccggggacactggcaaattcctggggttttggactgccctgatcaagtccggtttttcgttcattttctcgcccgaattgatcaccacagccgctggagaggtcgaggcaccgcgtcggaacatccccaaagccaccaagcggttcatctaccgtgttttcaccttctatatcctgggcagtttggttattggagtcactgtggcctacaacgaccctacccttgaggctggagtcgaaagcggcgggtcaggggccggcgcgagtccattcgtcgttgccatccaaaacgctggtattggagggctcaaccatgtcgtcaatgctgccatcctgatctctgcctggtcatccggtaacgcatggtgttacgctggatcgagaacgctgtactcgctcgccggtgagggccaggccccaaagatcttcacacgcaccaaccgcaccggcgttccctatgtggctgttcttgcgacatggacaatcggactgctatccttccttaatctgtctagctccggacagacggtcttctactggttcaccaatattactaccgttggcgggttcatcaactgggttctgatcggaatcgcctatctgcgcttccgcaaggccctgcaattccacggcatgctggacatgctaccattcaagaccccgctgcaaccatacggtacctactacgtgatgttcatcatctcgatcctgaccttgacgaacgggtacgcggtgttcttcccgggccgcttcactgcttcggacttcttggtctcgtacattgtttttgctatcttccttgcgctttatgctggacataagatctggtaccggacgccctggttgaccaaggtgtcagaggttgacatctttacgggcaaggatgagattgaccgtttgtgcgagaatgatatggagcgacagccccggaactggttggagcgagtctggtggtgga

SEQ ID NO: 28149 - DNA, 1650 bp, Emericella nidulans
ctcgcctttggctgccatgcagcctccgtctgtaatgctggggcattgtttccgttcagatgcaccgacgtcttatcatggatttagtcctctaccagggctaggccccggcgggtttaacttcaaggacttgtccatgaagaggtctaacggagactacttcggtacgaaggtcgtccggggctcatctccaacagcgagccttgctgcagatctgtctcagaattttcacattgatcagagcccccaggttgctacgccacgacggtctttgttctctgcttgcctactgggaaatggaaacagacgtggggtcgatgatgcgatgaccactccgccccttccatcctcatcacctgcacccgcgatggatatcatggacatgtccccactgcctcacaaacctccatttatcagtacgcctgaaatcgagctggactcgccaactctggagagctccccaatggacacgactatgatgtcaactgatggccttgttccggattcaccaacggttctaccgaaggatggtaaacaagagagaagacgtccgacttttctgcggcctagcttggcgagaagcaaagcgcagtccttccaggtcggaatgaccagacctgccccggaaagccaaggaccgcccttcaagtttcagaccaatggaatcaacaagacatcatcaggcgtagctgcatcattggaggacatgtttggcgaatccccacagcgtgaacggcccatgatgcgcatcaattcaaccagtggcctcaactcgcgtttaagaccaccattaggaagcgggagccatgtccgtggcaatggttcaccatcggcggcttcagttcggaaaagtgcgcacccgaatatgcggccccgcaagcaatgcagaagatcattgagtatgtacgaacatcccgaggatgtaattgccgacagcgaggtttcttatacatcaaatgcaccactccagtccattagcgacttcgaagaaacacaggctctgcagctacctcacttcattcccgaggagcaagcagacaatttaggtcgcatcgacaaggccaccctcgtggatatcaaagagggaaaatatgataatatgtttgacaatatcatgatcattgattgccggtttgaatatgaatacgatggcgggcacatcgtcggagctgtcaattacaatgacaaggagaatctggccgccgaactttttgcggacccgaagccacggactgctatagtcttccactgcgagtattcggtacacagggctcctcttatggccaagtatatccggcatcgggatcgtgcttataatgtggatcattacccccaactatcttatcctgatatgtacattctagaagggggctacagtggtttctttgctgagcatcgatcgctgtgctaccctcaaaactacgtcgaaatgtccgctaaggagcacgagtttgcttgcgagcgtggacttggaaaggtcaagcagcggtccaaattgagcagggcccagacttttgcctttggccaacagtccccggaaatggaggatagtcctaccgggaggtgtaggaacaaccccggtgatcgcaaacttctcgcttctccgttcaatgacagtcctggcagccgctttcctggccgtcgcatgct

SEQ ID NO: 28150 - DNA, 1702 bp, Emericella nidulans
agtcccccgtcggccaagagcatggaggagggtcgcaccccgtccgtccagtacggatatggagaccccaagacattggagggacaaatagaagagcacacagcaactaagcgtggtctgtcatcacgacagctgcagctgctcgccatcggaggatgtattggcactggtctcttcgtcggtacttcgacagtgctgacccagacgggtcctgctcctttgctgatgagctacattgtcatggcctctattgtctggtttgtcatgaacgtcctgggcgagatgaccacctacctgcccattcgcggtgtctcagtaccgtacttgatcggccgcttcaccgaacccagcattgggtttgcttccggctataactactggtattcatttgctatgctgctggcctgcgaagtgagtacaatggctttattatcattcttatcatgttggaatcctgacaatgtaggtcactgcctcgggttgatcattgaatactggaatccgcccgtcagtgtcggtctgtggatcgccattgtccttgttgaatccgagttctggttcgctggtctgaaaatattggccatcatcggtctgattatcctgggcgttgtgctgtttttcggtggaggcccaaatcatgagcgcttagggttccgctactggcaagaccccggtgcattcaatccgtacctggttcccggggacactggcaaattcctggggttttggactgccctgatcaagtccggtttttcgttcattttctcgcccgaattgatcaccacagccgctggagaggtcgaggcaccgcgtcggaacatccccaaagccaccaagcggttcatctaccgtgttttcaccttctatatcctgggcagtttggttattggagtcactgtggcctacaacgaccctacccttgaggctggagtcgaaagcggcgggtcaggggccggcgcgagtccattcgtcgttgccatcaaaacgctggtattggagggctcaaccatgtcgtcaatgctgccatctggatctctgcctggtcatccggtaacgcatgggtgttacgctggatccgagaagctgtactcgctcgccggtgagggccaggccccaaagatcttcacacgcaccaaccgcaccggcgttccctatgtggctgttcttgcgacatggacaatcggactgctatccttccttaatctgtctagctccggacagacggtcttctactggttcaccaatattactaccgttggcgggttcatcaactgggttctgatcggaatcgcctatctggtatgcttccctccatctcttcatctgaacacacctgaccaaaaacagcgcttccgcaaggccctgcaattccacggcatgctggacatgctaccattcaagaccccgctgcaaccatacggtacctactacgtgatgttcatcatctcgatcctgaccttgacgaacgggtacgcggtgttcttcccgggccgcttcactgcttcggacttcttggtctcgtacattgtttttgctatcttccttgcgctttatgctggacataagatctggtaccggacgccctggttgaccaaggtgtcagaggttgacatctttacgggcaaggatgagattgaccgtttgtgcgagaatgatatggagcgacagccccggaactggttggagcgagtctggtggtgga

SEQ ID NO: 28151 - DNA, 1715 bp, Emericella nidulans
ccagatcagatcgggccagacgtcaggcccaggaggacatttggagaccgcgtgcgacgagctgcacgtgcttttaccacgagagatggcctgatcggtgactacgactatggctttctctttacaccaagacttccatttgtgaagcagaaaaggagggctgctccgttctttggcctcgaggataagatcccactggtcctcgctttgcttctgggattgcagcatgcgctggcgatgcttgctggagttattactcctccaatcctgctggctggatcgtctggggccaactttggcgccgatgagtcgcaataccttgtctcgacctcgcttattgtgtcagggcttctttccgcagttcaaatgttccgtctgcatgtgtacaagactcgctactatgtcggcaccggactggtttcggtggtaggaacttcgttcggaacgattacagttgcaaccgggacgtttaatcagatgtactcaactggatactgtccagtcgatggctcaggaaacaggctgccctgtccgaaaggttatggggcactcctagccacctcctgcctttgctcgcttctcgaaatcgggctttccttcatgagcagcaggctgctcaaagctctcttcccgccaatcgtcactggcccaactgtcttcctgattggtgcgagtctaatcggcaacgcaatgaaagactgggccggcggttctggaacctgcagcagcaatccgggcaatggcgctctttgccccagcgccgatgcaccacaccccctgccttggggcagcgccgagttcatcggccttggcttcctcgttttcgccaccatcatcctctgcgagcgcttcgggtccccaatcatgaaatcctgcgctgtcattgtcggcctgctggtcggctgcatcgtcgccgcggcctgtggctacttcgaccgctccggcattgacgccgcccccgtcgcatccttcatctgggtgaaaacgtttccgttaacaatctacgccccactcattctccccctcctcgcggtgtatatggtcatcatgatggaatccatcggcgacatcacggccacctgcgatgtttcccgtctccaagtagagggtgctacttttgactctcgcattcagggtggcgtcctgggaaacggcataacatgtcttctcgccggtctctgcaccattaccccgatgtcagtatttgctcagaacaacggcgttatcgccctcaccccgtgcgcaaaccgcaaagctggctactgctgctgcttcttcctcgttgtaatgggcatctttgcaaaattcgccgcggctcttgttgccattccttcatccgtcttgggcggcatgacaacgttcctcttctcctccgttgcgatctccggcgtccgaatcatgtgcagcgttgactggacccgccgcaatagattcattctcacggcttcgttcgcggtcggtatggctgccacacttgtaccagattggttctcgtatttttttacgtatagtggtgacaaccatgcgcttgaggggcttttgcaggctgtcgagctggtcatggcaaatgggttcgcggttacagggttcttgggtctcctactgaatttgatcctacccgaggatatggaggaggatgttgtggagtccgaagaggactatgaagccacaactgtggtggggatgcagggcgggtgtgagcctggttcctctgg

SEQ ID NO: 28152 - DNA, 1744 bp, Emericella nidulans
atgccttccgccgatgagccttcttcaacccgcaccaacgggaccagttcccgatcggatcagcttgcgtactacaagaaacagtatgaacagcttgagtctgagcttgccgatttccaggcttccagtcgcgaattagaggcagagctagagaaggaaattgaggcgtctgagaagcgtgagcgacagttgaaggagaaggtggacaacctgaggtatgaagtggaggagtggaagtcgaaatacaagcaatccaagtcagaagctagtactgcccagaatgcactgcagaaagaaataacttcgctgcgtgatgcgaacctgacactacaactgaagttgcgggacacagaagttgccaatgatgattacgaacgtcaggcccggcataccacctcatccctggaggatatggagtccaagtacaatcaggctcttgagagagaggttctattggatatggagtataaacaaggcgaacaggaacgggagagtctgcgcattgagaatcagcggctccgtgatgaactgaacgatctgaagatcgaaactgagatcgttcaagagaggctcaggaacaataaccgccgccgccgcccagcacctcttgggcgcagtccctcgacgccgcatactcctgagatcttcgaccgttctcccggagaatcgacagtgtcttcgccgcttttcagcactcctccaaccaaactatcgctgacgctggcttctgcaactgcaacgccaccgtcacctcccatgtctgaaacgtcgagtagtatgcgcaagtcattgactgcagcatcggggtttcccctccagaaagcatcggcttccgaatcttttggtacacgatcgctttatggcaatagaccgcaacgatttcaagcccactcccgggccacctcttacgcatttagcaacggtcgctccacgccctctgctactactaccagacctagtttgcctaaagcgaacaacactaccgcaaatcgcccatctgggatacccaaatctggctctctgcatcagattcgtggacttatcgggaagatgcagaaactggaagagagggttcagtctgcaaaatccaagctacctcctccgtcagagactgcttcaagagcgtcctcgcgtgcgggctctatgctcgatgctagtcctggtgcggcgacaattgcgatgcggagggatactcgcaagcgactaagcggcagcagctttagctcatccgttagggacggcgatggagccccttcgtatgtcacatccagccgtccgtcttatggaactaggacacaaggagatagtcgtcctagcagtcgtaccagtttctccagttccctcagtcacagtactcacccaagtgtgacgccttctaaccgcccagaaagtcgccagagccgtacgaaaactccactgggccattattccaccaatcctaccactgaaagtcggcgaccacgctcgtcactcagcaacccggcggggcaatcgaccccaattaacggcatgacgtacatagacgaggatgaagaccttgccgaacagttcaatatgcgtgcaacgatcagctcaacgcgccctactcgtcttccgtcgttctccaatccagcattctctacacccactgggttgaagaaacggtcaactagcggcatgtcaggaattccagcacctagaaccttgcgacgaggaaataccatggggccgcccaaaacgaaaccgaagccggtggccggtgact

SEQ ID NO: 28153 - DNA, 1783 bp, Emericella nidulans
accggcaaccccattgaccatccttctcctgatcgcctttgtcctccttcttctctccgtgatatcgactcctattgttaagagtattccgttggcaacttttgacaatgtcgaatatggggtcttcggttattgcaaagctggcacttgcaccgcgatccacatcggctataccacagaggaaatcgaaaacactggaagtacggacagcgactttaacctcccgtccgacgcgcggagatcactttcttctatccttatcgtccacccgatcgctgcttttctcactttgatctgcctttgtctcgctgctgcggctcatctgcacgctccgtcgcattcgcctcgctacttactggccttgttgatcttgctccttccgactcttctcgtctcgttgcttgctttcctggtcgatatactgctctttgtgccgcatttgtcatggggtggctggatagttctcgccgcgactattatcctggtcacttgcggtgttgtcacttgtgccatgcgccggactctggtcagtcgcaaggctcgcaagaggcgcatcgcggaaaatgccgaaatgagtgggcagaactactataatcgtcagaacgccgctgcggctgcattgaatgagagcaagccaatcgcgcctgaagccaaagaaaccttcgtcgctgcaactcaaagctcagagtccgggcctacgttcgccacctttcgcacaaacacgcgttcaagtgacgacgatcgtacacctctaaataaccacagcgatccgagcgcccaagacgctgggtatcagtcgcggattcctggagatccagttccttataacgcccctcgagatgatttcgggaacccgttaccaccaggagcctacaactccgctcctagaatgcgtacgcctggacctcctggacccccacctcctgactccagagtgcgcgaccaatattcggacccgcgaagagggccccctacaggatttgctccacgtggccgtggcgggtatccacctcgcggaggatatggtcgtggcggaccttacggaggcccgtacgggcccaattctcgtgctcctctcaccgggcggggtggttatatgggcccaatgcgcggcggacctgcaggaccgatggcacgtggaggataccggccgcaaccggcagcgggcggatatggtaacgcacgcgcaatgggtgaagatgagtacggatatcgtggaccttcgtcacgccagcgtactcccgggccaatggcggcgccagcagctccgggcccagctggccaagctattgaaatgatgccgcagccgcgacatgagccggatgctcaggatgaagtacctgagcagcaacaactccatgccatttccattgataatcagcacgagcctgttagccccacgagcctttatagccgcacacagtcatatgtgcccccccgtagaaattggggaccgcaagcataccaatcgagcgagccaaacttgccatatcaacctaatcaaccacggcatgcccgttcccagtcaggtagtatgtattacgaagatgaggacccggtgtacacgagtcggaacgagtcggcagttggtaactcaggagtaccctctgtcttgacgccaggcaattctggtgagcaaaaattgaaggaaaatggggcggaacgtccgggctcacctgctgctagcgaagtaagccatttgacgtcatatcggagcggccaatcaaccccagtggtccgccccctatgccggcacaagctgttcaacagaagcgcgacgtcc

SEQ ID NO: 28154 - DNA, 1823 bp, Emericella nidulans
gagggcgccattggcattgaccttggcacaacctactcctgtgttgccaactacgaaggcacaaatgtggaaatcattgccaatgaacagggtagttacacaaccccctcgttcgtctctttcaccgacaaggagcgcttgattggtgaggcggccaagaaccaggctgccatgaaccctcagaacactatcttcgatatcaagcgtcttatcggtcgccgttatgaggaccccattgtcaagaaggatgtcgaatcttggcccttcaaggtcgtcgaccagggcggaaaccctgctgttgaagtcgagtatctcggagagaccaagactttcactcctcaggaaatctcgtccatggttctgatgaagatgaaagaagttgccgagaccaaacttggcaagaaggttgagaaggccgtcattactgtccccgcttacttcaacgacaaccagcgtcaagccaccaaggatgccggtgccatcgctggtctcaacgtccttcgtatcattaacgaacccaccgccgctgctatcgcctacggccttgggtctggaaagtccgagaaggagcgtaacgttctcatctacgatcttggtggtggtaccttcgacgtttcgctactcaacattcaaggtggcgttttcaccgttaaggccacagctggcgacacacatcttggaggacaggatttcgatacgaatcttcttgagcacttcaagaaggaattccagaagaagaccggcaaggacctctccggcgattccagggcccttcgtcgtcttcgaaccgcttgcgagcgtgccaagcgcaccctctcaaatgccactcagaccagtgtcgagattgactcattgtttgatggtgaagatttcaacacctctatcacccgtgctcgctttgaggatctgaatgccaagtcgttctccggtactcttgagcccgttcagcaggttcttaaggactccggccttgccaagaaccaggtcgacgagatcgtgcttgttggtggttctacccgtattcctcgcatccagaagctcctcagcgactttttcgatggcaagaagctcgagaagagcatcaaccccgatgaggctgtcgcctatggtgccgccgttcaggccggtatcctctccgggaaggcaacttcagccgagactcaggatctcctccttctggatgttgttcctctatctcttggtgtcgcgatggaaggtaacatcttcgctccagtcgttcctcgcggccagaccgtccccactattaagaagcgtaccttcactactgtggttgacaaccaaaccactgtgcagttccctgtctatcagggtgagcgtaccaactgcgccgacaacacttctcttggagagttcactttggctcccatcccacctatgagagctggagaggctgctctggagtgtgtcttcgaggttgatgtcaatggtatcctcaaggtcaccgccactgagaaatcttctggccgcagcgccaatatcactatctcaaacgctgtcggcaagctttctaccactgagattgaacagatgattgacgatgctgccaagttcaagaccagtgatgaggccttcaccaaacgatttgagtcccgtcaacagctcgagtcctacatctctcgcgttgaggaaatcatctccgaccctacaatgtctatgaaactcaagcgtggcaacagggagaagatcgagtctgccctcagtgatgccatggcacagctcgagattgaggattccactcccgaggatctcaagaagaaggagctggctctcaagagactcatcactaaggccatggccacgcg

SEQ ID NO: 28155 - DNA, 1841 bp, Emericella nidulans
ggctggcagccaagatgaagctcgtagccgtgctcctcgccctcgctacggtcgaggctcgtccaacggtcgacacgacctacccctacaccggccctgctgtcccaattggcgactgggtcaatccaaccatcaatggcaatggcaaaggattccctcgtctggtagaagctccagccgtgaagccgagatctgcgcatccaaaaaacaatgtcaatgtcatttcgctctcctacctccccgacggcatgcacatccactaccagacgccttttgggctgggccaggccccgtccgttcgctggggaaccagtccagcgaatttgaacaaggtggcccatggctggtcacatacctacgaccgcaccccctcctgcgcccaagtcaaagccgtgacccaatgcagccagttctttcacgaagtcagccttccccatttgaagcccgagaccacctattattaccggattcccgctgccaacgggacgactcaatccgacatcctcagcttcaagacggcgcgcgcccccgggcacaagcggtccttcaccgtggccgtcctcaacgacatggggtacacgaacgcccacggcacgcatcgccaactccttaaagcggcgaacgaaggcgctgcgtttgcctggcacggcggggatctaagctacgcggacgactggttctctggcatcctcccgtgcgcggacgactggcccgtctgctacaatggaactagtacgcaattgccaggcggaggtccgattcctgaagagtacaaacagccccttccgcagggcgagacggcgaatcagggaggcccgcagggtggcgatatgagcgtgctgtacgagtcgaactgggatctatggcagcagtggatgaccaacctcaccgtgaagatcccgcacatggttatgccgggcaaccacgagtcatgcgctgctgagttcgatgggccaggcaatcccatcaccgcgtatctaaacgaaggaatccctaacgggacatgggcagccgagaacctgacttactacagctgccccccctcccagcgcaacttcacggcttttcagcaccgcttccatatgccgggcaaggaaacagggggcgtcggcaacttctggtactcgttcgactacggccttgcgcacttcgtcagtctggacggcgaaaccgactttgctaacagtccattctcgaccttcgagcgcgatctcaccgggaatgagacccatccccgccccgaggaaaccgagaccacggacagcggaccgtttgggacgattgacggcgaccggtacgatgataataccgcgtatgcgcagtatcagtggctgaaggatctggctagcgttgatcggaccaagaccccgtgggtgtttgtcatgagccaccggcccatgtactcgtccgcgtactcgagctatcagaaccacgtacgaaacgcgtttgagaacctcttgctgcagtacggggtagacgcatacctctcaggccacattcattggtatgagcgtatgttccccatgactgccaacgggaccatcgacgagtcctcgattgccgacaaccaacaacctaacacgacgaacagcggcaagtcaatgacgcacatcatcaacgggatgggcggcaacatcgaaagccacagctggtttgacgagggcgagggtttgacggagatcacagcgaaactggaccgcacgcactttgggttcagcaagttgaccgtcgtcaacgagaccgtcgtcaactgggaatttgtcaagggtgatgatgggagtactggcgattggctgacgcttgttaaaggggagacctgtacgattaacgtgagtggatag

SEQ ID NO: 28156 - DNA, 1928 bp, Emericella nidulans
tacccccatcgcgcgaaacctccgtgaacatgtcgacccgccgtccgcttgcaaacgtgccgaatgcaaccaattcccctcacagagtaggcctcgtgcctgccaaacgtccccggacgaccagtgcacagattgacatcccttacggccagcctcctccgaagaaacaggttgtggacggggccggcgcggagaaccagcctatgagccagaccaagttcgccgccctacaaggcacggatccaaaattgtttacccgcaagacgaacaatgctcagccgagtgcatttgagaagaagctggtggctgctagggacaaggaacggcagcctcaaaaggccacaaagcaggagaagccgcccgcagaaaatatctcgatcaggcagtggcagaggcactatcggaaggcttttccccactttgtgttctactttgacgccgttccaattgatgttcgcagcaaatgctcacgacaggtcattgctttgggagcgcgtgaagaaaagttcttctcccgtctagtaacccatgttgttacatcccgaccaataccccccgagatagacaggcgagcacaaacggggcacacccaggatacaccaaatgagtctgctggggatggtgctatgctgcaaacagtcaatcctgctgaattggaaatgcatttacacttagccgtttgtcctaagcgtgaacaaagccaagatgtcctgcatcgagctcgggaaatgggtatgaagatctgggccgtagagaagctgcagcgcatgattgccacgatcaacgacatagatcttactaatgggagtggccattctacacggaataatgccgccgggtctcagacgaagtccagaggaaaagatgatctctcacaagttctccagaacgaactgaacggcccctctgaccgaagtcatctatctgtgctcaaagacttggtaccattcaagggcccttttatatacgtacatgacatggatgaaaagacacgacccgtcatggttcgagaatatcctaaagttgcaagacgacaagacggcgtgtggccgcagttcaggagtgctccgctcggcaagtgcccgtttatcgaggatgtgccctctaaacgagagattgaaagacaacgagctcgtcaggagaaagagaagaaagaatttatcaaacctgcagtgcctcaatctaaacacaccgcggtggaacctcgaaacgaggaaaacttgccgctcaaaaaagaaacgagtcctgccgagggagatgagctcgccccgcattgcaccaggcaagagactccggatgctcctcaagggcttcccttgtctcctaaaaagagctcagagagctttattccaccacagcttaaccgcaaaggcccgttctatcatggccgggaaccagccgcctcaggcgtacaaccttcaaacatcacctctgccattcgttctcaaatggtctcctcgacggctgctgcgcctggcgcaaaggccggtctcagcaaagaagtccatgagttgaaacgcaaagtgcttgagaagagtcacgtcggctactcgactaacgtcgcacagccctaccgggctttggatacggctacggccgagaggacagaaaagaccaacagttgcaaatcaagtcggcctgacaagctcggcaacattgaagaggagaccacacaatcagaagcaacagactcgacaaaatccaggacgattctccgtaagagcggagagcaaagaaagaaagaaagacgaagagacccaaagccaggatactgtgagaactgtagggataagttcgacgactttgatgagcatataatgacaagaaaacaccgcaaatttgctgcgaacagtgccaattgggccgagctagactcattactgttccagctggaacgaccgctcaaggatgaatacgattatgtctag

SEQ ID NO: 28157 - DNA, 1928 bp, Emericella nidulans
tccagcagtctcgggccatgtgtccgtttctcaagcgcagctcaccgaacacccttcgttcgttggctaccgctacccgtcccagcaccagccctggcggtggtactatgaccaatttgcagagaatcgctcgccgctgcccggtcatgagcaaggcgctcgctgtccagagtgcccgcatgactggcaccaagcgatttacttcctctgcggctggtgtacctggcgctggagctggtacccccaagcccacccggggttcgccgggaaagagggcgctgcactcgactggaggaaacggcgccaatatgagcactgagtttcacaagggagcccagcagattcaccctggcctttccaacgccacccgttctcacgtcggggcctcagcaaccgtttccggtcctactcctcgtgcccccgtggctgcgccattcgactacgacgccttctacaatgcagaactgcagaagaagcaccaggacaagtcgtatcgttactttaacaacatcaaccgtctcgctcaggaattcccccgcgctcatacggcttcgaaggatgagaaagtgaccgtctggtgctcgaacgactacctcggcatgggacgtaatcctgaagttctcgcgaccatgcataagaccctcgatacgtacggagccggcgcgggaggaactcgtaacatttccgggcacaatcaacatgccgtctcgctggagaatactctggccaaactccatggtaaagaagctgcgctggttttcagctcgtgctttgtagccaacgacgctactttggctactctcggcagcaagatgcctgactgcgtcattttgtcggactcgctcaaccacgcatcgatgatccagggtatccgccattctggccggaagaaaatggtcttcaagcacaacgatttggtcgacctcgagacgaagctcgcatctcttcctctgcatgttccaaagatcattgccttcgaatcggtgtacagtatgtgtggctctattgctccgatcgaggcgatttgtgatttggcggacaagtacggagccattactttcctagacgaggttcacgccgtgggaatgtacggaccgcacggtgctggagttgccgagcatcttgactacgagatctatgcttcgcaggacaccgcaaaccctctcagcaccaaaggcactgtcatggaccggatcaacatcattaccggtactcttggtaaagcgtacggatgcgtcggtggttacattgctggctctgccgctttagttgacaccatccgctccctcgcccctgggtttattttcaccacttcccttcctccagcaaccatggccggtgcggatactgcaatccggtatcaggcacgccaccagcaggaccgtatcctgcagcagttgcacactcgggctgttaagcaatcattcaaggatttagatatccccgtcatccctaacccctctcacatcgtccctcttctcgtcggtgatgccgagctcgccaagcaggcctcggacaagctccttgaagagcacggcatctacgttcaagcaattaactaccccaccgtgccacgcggtgaagagcgcctccggattacccccacccctggtcacacgcaagagcttcgtgaccaccttgtcgaagcagtcaacactgtctggaacgacctcggcatcaagcgcgcaagcgactggaaggcaatgggcggattcgtcggtgttggcgtggaagctgccgagctcgagaatcaacccatctggaccgacgcccagttgaatatgcgacctgatgaaaccctcgaggctgcagttgaacgcgagtttcaggccgcggttcctggcatgaaagccgggggtgcaaaggcgaagcccgtcggctcaatcgcggccaaccctatcggtgcctcaatcccagtcgcggctgct

SEQ ID NO: 28158 - DNA, 1994 bp, Emericella nidulans
acggaccaattgcccctcccaagcccgccgtggttgctgaggcccacgaggtcgacactttccacgttcccaaggcgttcttcgacaagcacccttccggccctcacttgaaaaatctcgatgaatacaagaagctctatgaggagtcgattcgcagcccagacgttttctgggcccgcaaagcccgtgagctgctcacttttgacaaagatttccaaacgacccgtatcggctcattggagaacggtgacgttgcttggttccctgagggtcggctaaatgcttctttcaactgtgtcgatcgtcacgccatcaagaaccccaacaaggtcgctatcatctacgaagccgacgaacccaacgagggccggacaatcacatatggcgagctgctccgcgaagtttctcgggttgcctgggttttgaaacagcgcggcgttaagaagggcgacactgtggctatctaccttcccatgattcctgaggccatcatcgccttccttgcgtgctcgcgtattggtgccgttcactccgttgttttcgccggtttctcgtcagactccctccgtgaccgtgtccttgacgccggttccaaggttgtcatcacaaccgatgagggtaagcgtggcggtaaggtcatcgggaccaagcgcattgtcgatgagggtctcaagcagtgccccgacgtgtcgaccgtgcttgtttacaagcgcaccggcgccgaggtgccctggaccgagggccgtgacatttggtggcacgaggaggttgagaagtaccctgcgtacattgctcctgactctgtcaactccgaggatcctcttttccttctatacacttctggttccaccggtaagcccaagggtgttatgcacactactgccggttacctcctaggcgcggctatgaccggaaaatacgtttttgatatccatgatgatgaccgctacttctgcggtggtgatgtcggctggattaccggccacacctacgtggtgtacgctcctctcctcctgggagtctcaacggttgtctttgagagtaccccggcttaccccgacttctctcgctactgggacgtgattgagaagcacaaggtgacccaattctatgtggcacccactgccctgcgattgttgaagagggctggtgaccaccacatccaccacaagatggaacatctacgtgtcctgggatccgtcggcgagcccattgctgctgaggtctggaagtggtacttcgagaaggttggaaaggaagaggctcacatttgcgacacctactggcaaaccgaaactggctccaacgtcattacccccttggccggtgtcactcccacgaagcctggcagtgcttccctgcccttcttcggtattgagcctgccatcattgatccagtctctggagaggagatctccggcaacgatgtggagggtgtgcttgccttcaagcagccctggcccagcatggcccgcactgtgtggggtgcccacaagcgctacatggacacatatctgcaagtctacaagggttactacttcaccggagatggagccggtcgtgaccacgagggatactactggatccgtggtcgtgttgacgatgtcgtcaacgtttctggtcaccgtctgtcaaccgcggaaattgaggctgccctcattgagcaccctatggttgctgaagcagccgtggttggtattgccgatgagttgaccggtcaggccgtcaatgcctttgtttcgctcaaagagggtaacgagaccaacgaccaagtccgcaaagacctcattctgcaagtccgcaagtcgattggacccttcgctgctcccaaagccgtctttgttgtcgacgacctgcccaagacccgtagcggtaagatcatgcgccgcatcctgcggaagattcttagtggtgaggaggatagcctgggcagcatttcaacgctgtccgatccatccgtggttgagagaattatcgccacagtgcacgcttcc

SEQ ID NO: 28159 - DNA, 2007 bp, Emericella nidulans
gggaattccgcagccacaggaggaatcgaagcgcgagacggaaccgttacagcctcacgataaaccagcgcgaccagatagcggccagtcgaatcaaccagcggtggaggacgaggcagaactgggcgagtacagcgaatttgggcctcccgatgatatgtctacgccgtcgcattttctccgccgtaatgtggctcctaccaaagacactactcatcttgaagatattgaggagaatccgaatgatgagctgagtccggcagcgacaccgacagttcggaagttcaaatcacagacgaaccaagatgtgaaacaagcagataaggatctacgccgtcagattgcagagctgactcaggctgtaaaggagcgcgatgagcagttggaaaggaaccgcaaccgcgttatcgaagcggcgtccgctggggaagaggttacgcacttgcgagccgaattacaaaggaagaccgccctgctggaggatatgcaagagagtcatgcagagagggtcatagccagaagatcttccctcaatgcgtctgactttcgggccctccagaaacagattgctgatatgcagaaagacctgaacagccgtagttcccatgctgatattgataccgagcgtctggagaccatttcattgctgcgccaacaactgtcgctgactcaagagcaattggaaaagcgcaatgccgtgctggatgatactcttgctagtttgaaacaagtcacagcgtcgaaagagcaacagctccacgaaaaagacgctgagattgacagactccgcagtcaggttgacgcccaacgcgcggaaattgagagactcgaaacggacgtcgccgaggcgcatcgtgagtaccgagcgcttgaagaccaaatggttctgcttgaaaccaagaaccggccattggaagaaaagaacagcacgctcgaagcagatttaaatcgcgcccagtctcaagtcacagctcaggagaatgccctcaaagccatggcagcagacttgccgaccgataccccgggtggaacgtatagcgaaatccttgaactgatcaaagatctgggccagccgaacaccaaccggtcgacgaggccaagggacggcagcgaccaggatcacgaccttgaacagatttacgaagaactatccaaactacgtactgaatcaagcgagcgagctgcgacaaacaagaatttggaggcccaactctcgcgcgctcatgaccaagccgcagaatctcagctcttgatccaatccatcgaagcagaaaataatcgtcttgttagaaacacagaagagctcaaatcaaagctggacaagaccttcaacgaattaaaccgtctccgcacagagcactccgaagcacaagagacgattacacgcctccaagaaagccaacaagctcaagctcaagcccaaatccaacaaccaagtcccccctcaacaccccacgcaaacccaaatacaacttcgctctctgctcttgaagcaaaccacaaagcccagatcgccaacctcaagaccgcccatgcaacagccctctctactcttcgctccgcccacgccgactcaactcgcaaactccgcgctttcctttctgccgctgaagcccgggaaaccgaactccgctctctgctcgaacaagagaaagaaatccaccgcaacgacgaagaggaaaaggatgcggagattcagcgtcttaactctgtcatcgcatccaaggacgaaacagccgccgccatggatttgcgcattgccaagtccgttgagaagcgcgagcgcgagtgggagcgtcgcgtggagttgctgcttaaagagcgcgagaggatgggcaaggcgcttttgtggagttggggcgagaaggagcaccctaccaagaaggctaagggaagtattagcggtagtgggaagactgctgccgtttctagttgtgagaccgataaggaaaatgtagatgatggaaggagacatgggcaggggcagccgtatagatataagtatgt

SEQ ID NO: 28160 - DNA, 2024 bp, Emericella nidulans
ggcgccatggccgaagaagcggtcgctcctgtagctgtgcctacgacccaagaacaaccaacctctcaacccgccgctgcgcaggttacaactgtcacttcgccctctgtgactgcaacagcggcggctgcgacagctgctgtggccagtccccaagctaatggcaatgctgcctctcctgtcgcccctgcgtcgtcaacatctcgtccagcggaagaactcacttgcatgtggcaaggctgctctgagaagctccctactccagaatccttatacgaacatgtctgcgagcgtcacgttggccgaaagagcacgaacaacctcaacctgacttgtcaatggggtagctgtcgtactactactgtgaaacgcgaccatatcacctctcatatccgggtgcacgttcctctcaagccgcacaagtgtgatttctgtggaaaagcgttcaagcgtccccaggatttgaagaagcatgttaagacgcacgctgatgactcggtcctggtacggtcgccagagcctggatctcgcaacccagatatgatgttcggaggaaatggcaagggctatgctgctgcgcactattttgagcctgctctcaaccctgttcccagccaaggctacgctcatggtcctccccagtattaccaggcccatcacgctccccagccatcgaacccgtcttacggcaacgtctactacgctctgaataccggcccagagcctcaccaagcgtcgtatgaatccaagaagcggggttatgatgcgcttaatgagttctttggtgacctcaagcgccgacaatttgaccctaattcctacgctgccgtgggccagcgcctgctcagtttgcagaacttgtccctgcctgttttaacggctgcgcctctgcccgagtaccaggcaatgcctgctcctgtggctgttgctagtggtccatatggtggcggccctcaccctgcgccggcatatcatcttccaccaatgagcaacgtccgaaccaagaacgacttgatcaacatcgaccagttcctgcagcaaatgcaggacacaatatatgagaacgatgataatgtcgctgcggctggtgtcgctcaacctggagcccattacattcataacggcataagctaccgcactacacactcgcctccgacacaacttccctcggcacatgccacaacccagacgactgctggtcctattatctcaaacacatctgcgcactccccttcgtctagcactccggctttgacaccgccctcaagtgcgcagtcgtacacttcaggtcgctctcccatttcacttccgtctgctcatcgcgtttctccgcctcatgaaagcggctccagcatgtaccctcgtctcccttcggcgactgacggtatgacttctggttacactgctgcgtcaagtgccgccccgccttccactctcggcgggatctttgacaatgacgagcgtcgtaggtacactggaggaacattgcagcgagctcggcccgcgtcccgtgctgcctcggagtcgatggacctgtccagcgacgacaaggagtctggggagcgaactcccaagcagatctccgccagtttgatcgacccggctctccattcaggatctccgggcgaggatgatgtaactcggactgccaaggccgcaaccgaggtggcggagaggtcggacgtccagtcggagtgggttgagaaggttcggctgattgagtacctacgtaactacattgccaaccgtcttgagcggggcgagttcagcgacgattcggagcaggaacaggaccaggagcaggaacaggaccaggagcaggaacaggaccaggagcagggacaggaccgtgtttctcggtcgccagtgtccaaggcggatgttgacatggagggcgtagagagagattctcttccccgttcaccgcgcacggttcctatcaagactgatggggaaagtgccgaggacagtgtgatgtatcccactttacgaggcctggatgaggatggagactccaaaatgcc

SEQ ID NO: 28161 - DNA, 2041 bp, Emericella nidulans
cgcctccgcagaagccagagacgtttatgctttcgaatgaagcacaacagagcctgccccatgatgcacaggtcgcacttcaacaagttgataatctgaaatacttccttctctcagcgccagtggactggcagccagaccagctcatccgaagatttcttctcccgactggtgattatatctcatgtgtactttggagcaacctgttccacatctcaggtaccgatatcgttcggtgcctggcattcagattccaagcctttggccgtcctgtcaagaattctaaaaaattcgaggagggcatcttttctgatttgcgaaacctgaaagctgggaccgatgctacgctcgaagaaccgaaaagcccgttccttgattttctttacaagaacaattgcatccgaactcagaagaagcagaaggtcttctattggtatagtgtgcctcatgacaggctgtttctcgatgcgttggagcgagatctaaaaagggagaagatgggccaggaggccaccacagtcgcagtcagcgaacctgctttgtcttttgagtttgattcgtcccagtcgttgtacgagcaactcacaaaggcacaacaagcgaattcatcctcgtttgctgcacacgcaagtacgacatatggccaatctgcatccccagtcgttcggaccgttgacgcaatgcctcctcctcagatggctccccagatggctccgccgtcgatcccccttctcacggacgaatcggccaattcccagatgtacacatcgatcccaatgcccaacccgattcctcagaaccttattaaacgcgaggcggattatggggctatccagtacgaccgaaacggtatgcccattgctcgcatccaccagcgccattcttcaatgccgaccttcgtcgagtactcgccggcgccgtctttcgtctcttcccaatacgaagattacagcaaccgcggcttatccttcgagcctgttacaccaccgcaacatagctctcatattggaccagaacctgcttacattgccaacgaagatacgggcttgtacactgcaattccggagatgtctactgggtctgggttcaaccccatgatgcacctaccgccgtctaacctcgcaagcgcgcattttcctaccccagcgagaactttccattccaatgtttattcggtcttagaaggatcccctacatataagcaacgccggcgtcgatcgtccatcccgcccggcgctgccaaccctgtcactactggcactcactcgcctgctcctgctctatcatacgcggctcataagcccagtgatttgcgacgctccgtttccagctcggttgcccccggggatacggatgactcacgtcatgagtcgttgcatcgctctgttaatagtacctatactgcaactcttcctcagaagaacctgatgcatgaaatgtcgcgtaacggcacacccctttccagtgtgggtgaacaccgcgagcaaagctccataccccttacgcaagcggaagatttgccagctcttccagcaaatggaaccgtggaatcaggtgctcccaacggtgtcggacataagagcgaccgttatgcaactggacctgtccgccgcgcccgaagtgctaccatgatggaacttggcccttacccgcagaagtctcattcttgccccatcccttcgtgcgggcgactcttcaagagattagaacatttgaaacggcatgtgaggactcacactcaggagcgaccatatccttgcccctattgcaacaaggctttttcgaggtctgataacttggctcaacatcgccgcattcacgaggctcagcaagacgggcagccactggtccacgaggacgatttggaaaatgatgacaacgagtctgtttctcatgacgaggatgagtctccgtctgaatctgttcaccctgctgttccgggtgttcacggaatgacctctatgccatcatccgtcgctctgcaatccacaatggggtcaatgatggggtcccacatgattgcaccccaactcctgcaaca

SEQ ID NO: 28162 - DNA, 2083 bp, Emericella nidulans
atcgcactggcggaggcagacaagtatgaggtgctggagaaaatcggctgcggctcatttggcatcattcgcaaagtgaagcgaaaatccgatggttttatactatgtcgaaaggaaatcaactatatcaagatgtccacaaaagagagagagcagctgactgccgaattcaacatcctgagctctctccgacacccgaatatcgtcgcctattaccaccgcgaacacctcaaagccagtcaggacctctacctttacatggaatactgtggtggtggagaccttagtatggtcatcaagaatctgaaacggacgaataaatacgctgaggaggatttcgtctggcgtatactgtcgcaattggtaacggccctatatcggtgtcactatggtacggatccggcagaggtgggatcaaacctgttagggcctgctccaaagccttcgggcctcaagggcaaacaggcccagatgaccattctacatcgtgacttgaaacccgaaaacatctttctcgggtcagacaatactgtcaagttgggcgacttcggcttgtccaagctgatgcactcccacgactttgcgtccacctatgtcggaacaccattctacatgtctccagaaatctgtgcagccgagaaatacactctacggtccgatatctgggcagttggctgtatcatgtacgaactctgccagcgggaaccgcctttcaacgcgcggacacacatccaacttgttcagaagatccgcgaaggaaaatttgcccccctgcccgatttctactcatcagagttaaagaatgtcattgcgagctgcctgcgtgtcaatccggaccatcgtcccgacacggctacgctcatcaacactcccgtcatccgccttatgcggagggaggtggaactgaacaacttatcccgagcagcacgaaagcgagaggaggctaccatgcaaaaggcgaaggatgtggaacaagcgtttgccaaacttgaaaaggagaagcagcaaattcggtcggagctcgagaactccatccggcgggagtgggaggtaaaggcaagattagagatcgatcgccaagttcaaaacgaattagacaagctccgcaaaagatttgaatgcgaggttcaggatcgtgtagcccaggaagtcgaaaagcaacgacgaaacgccaactatcgcgaggatgctagtttgcgatctagtggtcacagctcccagatgtcgtccagcaacagcgaagactccgacttcccttcgagtacagatattagccaattgtcacttgagtcgccgacgaacaaagctgccaagctgcccaaaaaagagtcacgcacccccttcacccgctctaagacggttgttgattccccaatggacatacaaatggccgagccgtcgcccatctcaatagcgtctctttctctgtcgcctcgccgcacctcagcaacgtactctggaaagaatatattcgccgaaggggaacgaaagcgtcccaagttcgagcccaccctggcgtactcggacgacgaggacgacacaccggagcttccatcgcccactcgaccaaaggtcaagcccgatcctttcaaagctccctcgcgcccacttctacgacaaaacacgactgcattaatgcagaagctaagcacccaacctcccatcttcccggccaatccttcaagactccctcagatgtcggcgcctgatgtgagggaatcaaagtcacggtccccccaccgacggttgtctaagatcccatcgtccgccaacctcgctgccgatgcggggtcgccgacccgcaagaatggcgtgaaatcgagcccatcgaaaatgaacggtggtgacgagatgttcaaagccgtcatgcagcgcaatatgggcggcagaacgctggtcgagctggcgcaagcccgtgccggtggccggcccattgacgaggtcaagcgttgtgccagtgattcccggtctggctgctccgttcccatgaagtcagccgaccgtgatccacctgcagtctgggatcctgaacgggatgagatgccgagcccgttcctggctaggggaagaaaggtgattcgca

SEQ ID NO: 28163 - DNA, 2114 bp, Emericella nidulans
gccgaagacggcacagtctggcagtacgaagtcaagtcggggagaatggacaaactccttacacgcactgcgctggcagtgcgcgatatcgccattacgaaggataatggatgggttgctgtcgcgagcgatgagcttactgtaaaactggtgaacatcgaggacatgaccaaggtcaagtatatgagggaacagacaaagggaacgaaacacatcacctttgacccgaatggaaggtatgttgcggtgtcgtgtacggatggaatcgtatatctctactcaatggacaccgaggagcccgaactggcgcggaagctagacggtgtgatccggcggctcgaacccgaagatgaagcgaccgcgagggtggtctggcatcctgatggtactgcatttgcgacggcggatgcgagccgggatattgccttgttctccgtgggcgagtggaagaaggagatgtcgttctctggtggccataatggggatatcacggccatgagttggtctcctaacggggcgctcatggtgaccgctgcaaaggacggccaggtgctgctctgggaaagtaagacgcagaagattctccatcgatacaactttccaaacgtgatcaacctcgcatggcatccgacaaagaacggtgtctcactcaccacgtcagacggagagatattcatcttcgacggatttgtgcccaaggactaccaagctctacttcagaagccgctacaagcagcacctatatttcccggcgcattgactgagatatccgataatgtgcagcgacccttggcgagtcggcctaaggaggcactgcgcaggggcagcattgactcgctagatgatatcctgggttacgaccaagacatggaagactttgtcgaagacgacgatggagctggttatgttgaggatgtcaatgggttcgggaagcgcacgaacaagcatctgggtgatattgagggtcatatggataaacggacattgacatcgtttccgaagccaaagatccacccgccacttcaacctggtagcacgccttggagggggaatcgccggtatttatgcttgaacttgacgggtgctgtgtggactgtggaccaggaaacccataatactgtgacggtggaattttatgaccgggaactgcaccgtgactttcactttactgacccgtttttgtatgatcgggcatgcctaaatgaaaatggggctcttttctcaaacaatccagttgatgatagccctgccacgatcttctatcgtccgcatgagacgtggacaacgcgagcagactggaaaactacgctgccaaaaggagaacacattcgagcgctggcgcttagtgattcgtacattgtcgcagtaacgacaaaagactatgttagagtatatacattatatggcacacctttcagggtgtacagacagaaaagcccggccgtgacctgcgccgcctggagagactatgttatgaccataggcaacggaccgctgggaagcgacgggcgaacggggacgctgcggtactcgatcgaaaacgtcaagcgcgacgaaatatgccagaacgaggatgttgtggctatcccggaaggagctgagctgaaaagcgttttcttcacagacatgggggacccttgtatctacgacacggaaggcgtgctgctggtcctgcagcactggcgcacccaaggccaagcgcgctgggttccactcctcgacacaaagcagctggagcgactggcaagcggccgcaaagaagaaacgtactggcccgtcgcagtcgcgcaggacaaatttcactgcatcattctgaaaggcggagatcgatacccgtacttcccacgaccaatgctcagcgaattcgatttccagatccccatctccgacaagcccaagccgcaagaggaagacgaagaaggaagcaccgcgcgcaacgacagtatgcgccttgaggaatcttttgtccgtggtaatctcctcctctcactgttccaggacctcctttcggccacgcacgcgacggccacgcagcgcgctgaattgtcgcggaaggagctggagcttgacaaggtgcttctgcagcttctggcgatcgagtgccgagagggcga

SEQ ID NO: 28164 - DNA, 2152 bp, Emericella nidulans
tgcgagctctcggcctggtcggccttgttggcgtcgccaatgccgtctgtccgtatatgacaggcgagctcggccgtcgcgataccaaccccgatgctaccgaggccactgaggaatttctgtccgagtactaccttgacgacacggactcgtacctgacgactgacgtcggcggcccaattgaggaccagcagagtctcaaggccggtgcgcgcgggtctaccctgctggaagactttatcttccgtcagaagatccagcgattcgaccacgagcgggtccccgagcgtgccgtccatgctcggggtgcaggtgcccacggtgtcttcacctcgtacggcgacttctccaacatcaccgccgcctccttcctctctgctgagggtaaggagacccccgtcttcgtccggttctcgaccgtcgccggcagtcgtggcagttctgacctcgcccgcgatgtccacggtttcgccacccgcttttacactgacgagggcaactttgatatcgtcggtaacaacattcccgtctttttcatccaggatgccatccagttccccgacctgatccacgccgtcaagcccaagggcgatcgtgaaatcccgcaggctgccacggcccatgacgccgcctgggatttcttcagccagcagccctcgactcttcacaccctgctctgggccatggccggtcacggtatcccgcgttcgttccgccacgtcgatgggttcggtgtgcacactttccggctcgtcacggaggatggctccaccaagctcgtcaagttccactggaagaccctgcaaggtttggcaagtatggtctgggaggaagctcagcaaatttctggcaagaaccccgactacatgcgccaggatctgttcgagtcgattgaggctggccggtaccctgagtgggagcttaacgtgcaaatcatggacgaggaggaccagttgcgctttggcttcgaccttttcgaccctaccaagattgtccctgaggaatacgtcccattgaccccgctgggcaagatgaccctcaaccgcaacccccgcaactactttgccgagactgagcaggtcatgttccaacccggccacgtcgtgcgtggtgttgacttcaccgaggatccccttcttcagggacgtcttttcagctaccttgacacccagctcaaccgcaatggtggcccgaactttgagcagttgcccatcaaccagccgcgcgttgctattcacaacaacaaccgtgacggtgctggccagatgttcattccgctgaaccccgatgcgtacagccccaacacgctgaagggatcaaccctcaaacaggccaaccagactgcgggtcgcggattctttactgctcctgaccgtactgccaacggcaatcttgtgcgtgccaagagctccaccttcgatgatgcttggtcgcagccccggcttttctggaactctcttcttcccgccgagaagcagttcgtggtcaacgccattcgcttcgaaaacgccaatgtgaagagcgatgtcgtgaagaacaacgtcatcgttcagcttaatcgaatctcgaacgaccttgccacccgcgttgccaaggccatcggtgttgatgctcccgagcccgacaacacttactaccacgacaacacgacctccaacatcggtgcgtttggccaccgactccagagcttggctggcctgaagattgccgtacttgcttctgttgacgcagaggaatccttcagcgcggctactgctctgaaggccgagctctccaacgacaacctggacgtcattgtcgtcgctgaacgcttctccaacggcgtgaaccagacctactctgcctctgacgccattcagtttgacgccgtcgttgttgcccctggagcggagaagctcttcggtgccaagtccgcggccaactccagctcaaccctctaccctgccggccgtcccctcgaaatcctcgttgatgctttccgcttcggtaagccagtcgctgctcttggcagcggctccactgctttcgacaacgctggtatcaacaccgccgtcgagggcgtgtacgttgccgatgccgtggacgagagctttgccaacaacctcgaggagggtctgaccgtgttcaagttcttggatcgctttgccctgga

SEQ ID NO: 28165 - DNA, 2281 bp, Emericella nidulans
cgaccactccccgcaccatcccaccaaggcgccacgacttgagaccgcttccaatgtcattctcattgacaactacgactctttcacctggaatgtctatcaatacttggtcctagagggagcaaccgtcactgtcatccgcaacgatgagatctctctggaggagctgattgcgaaaaagccgacgcagctggtggttagtcctggccctggccaccctaagtctgacgcgggtatcagcaacgctgctattcagtattttgctggaaagatacctatttttggagtgtgcatgggccagcaatgcattcatcactcgttcggcggtaaagtcgatgttaccggagagattctgcatggtaagacgtcagtcctgaaacacgacggaagaggtgcctacgaaggtcttcccccttcggttatcattaccagatatcactctctggcaggaacgcactctaccatacccgagtgcctggaagtgagctcttttgctcaattgggtgaggatgccgacaagactgtcattatgggcgtgcgacacaagcagtttgcggtggaaggcgttcagtttcaccctgagagtattctgacagaacatggtcaaacgatgtttagaaacttccttaagcttactgccggcacctgggaaggcaatggaaaggatgttgctcagggaggcaatttcaccgccgccgctcccaaccctccgaaggctactaagcaggtgtcaatcttggagaaaatttatgatcaccggagagcggctgttgctaagcagaaaactattccgtctcagcgcccatctgatcttcaggctgcctatgaactcagcgttgctccgcctcaaatatcgtttcctgatcgccttagacaatcagcgtatcctttgtctttaatggccgaaataaagcgcgcgtctccatcaaagggcctgatagcagagcatgcatgtgctcctgcacaagcccggcaatatgctaaggctggtgccagtgttatctccgtgcttactgagcccgaatggttcaagggcagtatcgacgacctacgtgcggtgcgtgcaagtctagagggactgactaacagacctgctatcctgcgaaaggaattcattttcgatgaatatcagattttggaagctcgtctggcgggcgcagatacgtcctacgtaattgtgaaaatgcttgacactgagcttctcacacagactttatctttattccagagccttgggatggaaccccttgttgaggtcaatacaccggatgagatgaagatcgcagtggaccttggcgctcaagtgattggcgtcaacaacagagacctaacaagctttgaagttgatcttggcactaccagccggctcatggaccaggtacccgagagcactattcgtttgtgcactatgcggtatttctggaccaaggatgtagaagcctacaagaaggatggtgtgaaagctattctcgtcggagaggcccttatgcgtgcgccagacactgcagcattcgtcgctgagcttctgggaggacaatccaagaagcttcctctgcagtcacgaaattcacctctggtcaagatctgtggtacaaggactgaagaaggggcgcgcgcggctattgaagcaggcgcggatttaattggcattattctcgtcgaaggccgaaagcgcactgttcccgatgatgttgcgttgcaaatctcgaaagttgtaaagtccaccccgaggcccactccttatccaactgaggtgccacaaggagatacggacgctacctctgttgactatttcgaccattccgccacgactttgcggcaccccactcgtgctttgttggtgggtgtattcctcaatcagcccctatcgtatgtcctagcccagcagcaaaagctgggccttgacgtggttcaattgcacggttccgaaccgcttgaatggtctaggttaataccggttcccgttatccgcaaatttgggcttgatgagttcggcatcgcccgaagggcatatcacaccgtgccgctgctggattccggagctggcggctctggagaactcttggatcagatgcgcgttaagcagattctaaagtctgatgacggattgcgggtcattttagctggtggcctggatccacttaacgttactgaaatcatcaaacagcttgacgaatctggatataagatcgttggtgtcgatgtcagctccggagttgagacaaatggtgttcaggatctcgataagatacgttcatttgtccaagcagcaaagagtgcc

SEQ ID NO: 28166 - DNA, 41 bp, Emericella nidulans
gaattcactgcggccgccatgtttggtcaagcgtaacaccc

SEQ ID NO: 28167 - DNA, 41 bp, Emericella nidulans
gttctcgagacgagcgatcgcgatggtaacaacaccaccgt

SEQ ID NO: 28168 - DNA, 41 bp, Emericella nidulans
gaattcactgcggccgccatgccccgtccggctaccgatct

SEQ ID NO: 28169 - DNA, 53 bp, Emericella nidulans
gttctcgagacgagcgatcgctcatttcatttcagtaaataattccaattcca

SEQ ID NO: 28170 - DNA, 49 bp, Emericella nidulans
gaattcactgcggccgccatgcagagtgcaaaccaaagtaactttcagg

SEQ ID NO: 28171 - DNA, 57 bp, Emericella nidulans
gttctcgagacgagcgatcgcttttagaactttcatcgttataaattagacatacgc

SEQ ID NO: 28172 - DNA, 41 bp, Emericella nidulans
gaattcactgcggccgccatgccgtccaaaccccctatatt

SEQ ID NO: 28173 - DNA, 47 bp, Emericella nidulans
gttctcgagacgagcgatcgccgagcaagtctaggtatagtcagttc

SEQ ID NO: 28174 - DNA, 40 bp, Emericella nidulans
gaattcactgcggccgccatgtctaccgctctccctccag

SEQ ID NO: 28175 - DNA, 43 bp, Emericella nidulans
gttctcgagacgagcgatcgctgttcattgattttgcttttgg

SEQ ID NO: 28176 - DNA, 41 bp, Emericella nidulans
gaattcactgcggccgccatgctccagggcctgctctttgg

SEQ ID NO: 28177 - DNA, 46 bp, Emericella nidulans
gttctcgagacgagcgatcgctcgaattcagagcaaagctcctggt

SEQ ID NO: 28178 - DNA, 41 bp, Emericella nidulans
gaattcactgcggccgccatgttctccgcacggggaagtgc

SEQ ID NO: 28179 - DNA, 42 bp, Emericella nidulans
gttctcgagacgagcgatcgcgaaccaggcattaccgggaca

SEQ ID NO: 28180 - DNA, 43 bp, Emericella nidulans
gaattcactgcggccgccatgtatctccgaatactgggccttg

SEQ ID NO: 28181 - DNA, 46 bp, Emericella nidulans
gttctcgagacgagcgatcgctgaagcaatcaagtctaattaaaga

SEQ ID NO: 28182 - DNA, 41 bp, Emericella nidulans
gaattcactgcggccgccatggaatactgggccttgtccat

SEQ ID NO: 28183 - DNA, 44 bp, Emericella nidulans
gttctcgagacgagcgatcgcgcagtaatgaagcaatcaagtct

SEQ ID NO: 28184 - DNA, 43 bp, Emericella nidulans; identical to SEQ ID NO: 28180

SEQ ID NO: 28185 - DNA, 46 bp, Emericella nidulans; identical to SEQ ID NO: 28181

SEQ ID NO: 28186 - DNA, 45 bp, Emericella nidulans
gaattcactgcggccgccatgcatcctctaagcttatctccgaat

SEQ ID NO: 28187 - DNA, 45 bp, Emericella nidulans
gttctcgagacgagcgatcgctctaattaaagatgaatgccatga

SEQ ID NO: 28188 - DNA, 41 bp, Emericella nidulans
gaattcactgcggccgccatgcctaggcatgccaatttacg

SEQ ID NO: 28189 - DNA, 41 bp, Emericella nidulans
gttctcgagacgagcgatcgcacgatactttttcacgggac

SEQ ID NO: 28190 - DNA, 43 bp, Emericella nidulans; identical to SEQ ID NO: 28180

SEQ ID NO: 28191 - DNA, 46 bp, Emericella nidulans; identical to SEQ ID NO: 28181

SEQ ID NO: 28192 - DNA, 41 bp, Emericella nidulans
gaattcactgcggccgccatgaggtgacatgtgaggcaaca

SEQ ID NO: 28193 - DNA, 41 bp, Emericella nidulans
gttctcgagacgagcgatcgcggacgtacgctctcggatta

SEQ ID NO: 28194 - DNA, 41 bp, Emericella nidulans; identical to SEQ ID NO: 28192

SEQ ID NO: 28195 - DNA, 41 bp, Emericella nidulans; identical to SEQ ID NO: 28193

SEQ ID NO: 28196 - DNA, 42 bp, Emericella nidulans
gaattcactgcggccgccatgggtgtcccatcaaacaagatt

SEQ ID NO: 28197 - DNA, 41 bp, Emericella nidulans
gttctcgagacgagcgatcgctcacgggacgaaggatcata

SEQ ID NO: 28198 - DNA, 42 bp, Emericella nidulans; identical to SEQ ID NO: 28196

SEQ ID NO: 28199 - DNA, 41 bp, Emericella nidulans; identical to SEQ ID NO: 28197

SEQ ID NO: 28200 - DNA, 41 bp, Emericella nidulans
gaattcactgcggccgccatgttccaaagtggctctccatt

SEQ ID NO: 28201 - DNA, 40 bp, Emericella nidulans
gttctcgagacgagcgatcgcgcgagtacaaccgtggaaa

SEQ ID NO: 28202 - DNA, 41 bp, Emericella nidulans
gaattcactgcggccgccatgtttaccatcctacgcagcct

SEQ ID NO: 28203 - DNA, 41 bp, Emericella nidulans
gttctcgagacgagcgatcgcagacactgcttcccgactca

SEQ ID NO: 28204 - DNA, 41 bp, Emericella nidulans
gaattcactgcggccgccatgtctggtagcgctggctactt

SEQ ID NO: 28205 - DNA, 42 bp, Emericella nidulans
gttctcgagacgagcgatcgcgacggtaagtggtgtatgctt

SEQ ID NO: 28206 - DNA, 40 bp, Emericella nidulans
gaattcactgcggccgccatgggtggtcccttccacttcc

SEQ ID NO: 28207 - DNA, 41 bp, Emericella nidulans
gttctcgagacgagcgatcgcctggcaacaacgtcctggta

SEQ ID NO: 28208 - DNA, 41 bp, Emericella nidulans
gaattcactgcggccgccatgcagtctgctgacgagaatgc

SEQ ID NO: 28209 - DNA, 43 bp, Emericella nidulans
gttctcgagacgagcgatcgctataaagaaacagacccagtcc

SEQ ID NO: 28210 - DNA, 41 bp, Emericella nidulans
gaattcactgcggccgccatgtccgctcctggagttcataa

SEQ ID NO: 28211 - DNA, 41 bp, Emericella nidulans
gttctcgagacgagcgatcgctcaaattgtgcgctttgaga

SEQ ID NO: 28212 - DNA, 41 bp, Emericella nidulans
gaattcactgcggccgccatgccccctctcactctctcctt

SEQ ID NO: 28213 - DNA, 41 bp, Emericella nidulans
gttctcgagacgagcgatcgctcatagatccagccgaaagc

SEQ ID NO: 28214 - DNA, 41 bp, Emericella nidulans
gaattcactgcggccgccatgattgaagaggacggtcaagc

SEQ ID NO: 28215 - DNA, 48 bp, Emericella nidulans
gttctcgagacgagcgatcgcgagacaaatatgacatttcaaatacaa

SEQ ID NO: 28216 - DNA, 41 bp, Emericella nidulans
gaattcactgcggccgccatgtaatcacgagttgcagtggc

SEQ ID NO: 28217 - DNA, 44 bp, Emericella nidulans
gttctcgagacgagcgatcgctgcccatctaattctttaattgc

SEQ ID NO: 28218 - DNA, 41 bp, Emericella nidulans
gaattcactgcggccgccatgggagggcctgtccttctact

SEQ ID NO: 28219 - DNA, 46 bp, Emericella nidulans
gttctcgagacgagcgatcgcgacaattccttcttgaactacattc

SEQ ID NO: 28220 - DNA, 41 bp, Emericella nidulans
gaattcactgcggccgccatgcgggaatacttccaggcaac

SEQ ID NO: 28221 - DNA, 39 bp, Emericella nidulans
gttctcgagacgagcgatcgccctgcgtccgacaagaac

SEQ ID NO: 28222 - DNA, 41 bp, Emericella nidulans
gaattcactgcggccgccatgagaagggagaggcaacacct

SEQ ID NO: 28223 - DNA, 41 bp, Emericella nidulans
gttctcgagacgagcgatcgcgaccagtccagtcagcatcc

SEQ ID NO: 28224 - DNA, 41 bp, Emericella nidulans
gaattcactgcggccgccatgggttctgttgcatgttgcat

SEQ ID NO: 28225 - DNA, 42 bp, Emericella nidulans
gttctcgagacgagcgatcgccattatccgtgcacagtagcc

SEQ ID NO: 28226 - DNA, 39 bp, Emericella nidulans
gaattcactgcggccgccatggtctcgccatcatcaccc

SEQ ID NO: 28227 - DNA, 42 bp, Emericella nidulans
gttctcgagacgagcgatcgctggtatgcatccaatccctaa

SEQ ID NO: 28228 - DNA, 41 bp, Emericella nidulans
gaattcactgcggccgccatggaaccgaaatccaaacctca

SEQ ID NO: 28229 - DNA, 56 bp, Emericella nidulans
gttctcgagacgagcgatcgctcaaagatatatatttaacattagcttcaaatacg

SEQ ID NO: 28230 - DNA, 42 bp, Emericella nidulans
gaattcactgcggccgccatggccaagtcaaatgatgattcc

SEQ ID NO: 28231 - DNA, 41 bp, Emericella nidulans
gttctcgagacgagcgatcgcgaaactccccacgatctgaa

SEQ ID NO: 28232 - DNA, 43 bp, Emericella nidulans
gaattcactgcggccgccatgcagtcacgtactgaccctgaga

SEQ ID NO: 28233 - DNA, 41 bp, Emericella nidulans
gttctcgagacgagcgatcgcggggatttgtctgatcccta

SEQ ID NO: 28234 - DNA, 41 bp, Emericella nidulans
gaattcactgcggccgccatgttatcagtccaccaccctcc

SEQ ID NO: 28235 - DNA, 52 bp, Emericella nidulans
gttctcgagacgagcgatcgccagatactaaagaattatatttaagtaagca

SEQ ID NO: 28236 - DNA, 41 bp, Emericella nidulans
gaattcactgcggccgccatgtccttgcaaaacatcctcgt

SEQ ID NO: 28237 - DNA, 46 bp, Emericella nidulans
gttctcgagacgagcgatcgctgacttcgtatgtaaaaacaccaaa

SEQ ID NO: 28238 - DNA, 41 bp, Emericella nidulans
gaattcactgcggccgccatgccttgcaaaacatcctcgtc

SEQ ID NO: 28239 - DNA, 44 bp, Emericella nidulans
gttctcgagacgagcgatcgccgaattgacttcgtatgtaaaaa

SEQ ID NO: 28240 - DNA, 41 bp, Emericella nidulans
gaattcactgcggccgccatgtccagcgacactatcgacaa

SEQ ID NO: 28241 - DNA, 43 bp, Emericella nidulans
gttctcgagacgagcgatcgccctctttgtcttggattttcgt

SEQ ID NO: 28242 - DNA, 41 bp, Emericella nidulans
gaattcactgcggccgccatgcctatcatggattcccgaaa

SEQ ID NO: 28243 - DNA, 41 bp, Emericella nidulans
gttctcgagacgagcgatcgcttcatccagcttggtcgata

SEQ ID NO: 28244 - DNA, 41 bp, Emericella nidulans
gaattcactgcggccgccatggactaaccctgcccaactca

SEQ ID NO: 28245 - DNA, 48 bp, Emericella nidulans
gttctcgagacgagcgatcgctcaatcaaatatcagttagaacgaaga

SEQ ID NO: 28246 - DNA, 43 bp, Emericella nidulans
gaattcactgcggccgccatggaacctttgttcgttgatgtga

SEQ ID NO: 28247 - DNA, 41 bp, Emericella nidulans
gttctcgagacgagcgatcgctggttaacaacagccattca

SEQ ID NO: 28248 - DNA, 41 bp, Emericella nidulans
gaattcactgcggccgccatgcagcgtcttttcgtagctca

SEQ ID NO: 28249 - DNA, 41 bp, Emericella nidulans
gttctcgagacgagcgatcgccttcagaccaggcagtggtt

SEQ ID NO: 28250 - DNA, 43 bp, Emericella nidulans
gaattcactgcggccgccatgcttagccctacctatctcaacg

SEQ ID NO: 28251 - DNA, 56 bp, Emericella nidulans
gttctcgagacgagcgatcgcgactagataaatagatggattactattttacactg

SEQ ID NO: 28252 - DNA, 41 bp, Emericella nidulans
gaattcactgcggccgccatggccggtttataacccgtatg

SEQ ID NO: 28253 - DNA, 42 bp, Emericella nidulans
gttctcgagacgagcgatcgcgcactcctaaggaagaagctg

SEQ ID NO: 28254 - DNA, 41 bp, Emericella nidulans
gaattcactgcggccgccatgcactccaaacgccatatcct

SEQ ID NO: 28255 - DNA, 42 bp, Emericella nidulans
gttctcgagacgagcgatcgctcgctttcaaagcatttatca

SEQ ID NO: 28256 - DNA, 43 bp, Emericella nidulans
gaattcactgcggccgccatgtcccgacagtgcatgtttacga

SEQ ID NO: 28257 - DNA, 56 bp, Emericella nidulans
gttctcgagacgagcgatcgcaaaatttactgctgtaggtagctagacccttctca

SEQ ID NO: 28258 - DNA, 40 bp, Emericella nidulans
gaattcactgcggccgccatggtgcgttggggcttcacga

SEQ ID NO: 28259 - DNA, 39 bp, Emericella nidulans
gttctcgagacgagcgatcgccacactgcgcagcgagcc

SEQ ID NO: 28260 - DNA, 41 bp, Emericella nidulans
gaattcactgcggccgccatgatcccggcctgttctttgct

SEQ ID NO: 28261 - DNA, 51 bp, Emericella nidulans
gttctcgagacgagcgatcgcgaaagatgatatttgaaattgatgcaggga

SEQ ID NO: 28262 - DNA, 41 bp, Emericella nidulans
gaattcactgcggccgccatgtcgggagcaggtgtggttgg

SEQ ID NO: 28263 - DNA, 45 bp, Emericella nidulans
gttctcgagacgagcgatcgctggtccttcccacctatgtaccca

SEQ ID NO: 28264 - DNA, 44 bp, Emericella nidulans
gaattcactgcggccgccatgcggtgaagaactcggcctcaaca

SEQ ID NO: 28265 - DNA, 55 bp, Emericella nidulans
gttctcgagacgagcgatcgctttactaagaaaagaaaacaaaatgatgcaaaga

SEQ ID NO: 28266 - DNA, 43 bp, Emericella nidulans
gaattcactgcggccgccatgcgacgagcgtgttcgacgacat

SEQ ID NO: 28267 - DNA, 41 bp, Emericella nidulans
gttctcgagacgagcgatcgccggtgggcggtgaccagaaa

SEQ ID NO: 28268 - DNA, 43 bp, Emericella nidulans
gaattcactgcggccgccatgcgattgaggtcatgcgcgagtc

SEQ ID NO: 28269 - DNA, 49 bp, Emericella nidulans
gttctcgagacgagcgatcgccgggccaaacaatgatgatattgtggta

SEQ ID NO: 28270 - DNA, 43 bp, Emericella nidulans
gaattcactgcggccgccatgcctcgcacatctgccaaatgga

SEQ ID NO: 28271 - DNA, 55 bp, Emericella nidulans
gttctcgagacgagcgatcgcaatgtaggcattgctatttcccatagctattacg

SEQ ID NO: 28272 - DNA, 45 bp, Emericella nidulans
gaattcactgcggccgccatgccagcggcaagagtcaagggaaat

SEQ ID NO: 28273 - DNA, 44 bp, Emericella nidulans
gttctcgagacgagcgatcgctgtcccttccttgctcgttcgat

SEQ ID NO: 28274 - DNA, 43 bp, Emericella nidulans
gaattcactgcggccgccatgtcgtttctgggtctcgggatcg

SEQ ID NO: 28275 - DNA, 52 bp, Emericella nidulans
gttctcgagacgagcgatcgccacatctctatccattgacagaatggctgac

SEQ ID NO: 28276 - DNA, 55 bp, Emericella nidulans
gaattcactgcggccgccatgaggtcgaaatacttcaacttgagaatgcccttcg

SEQ ID NO: 28277 - DNA, 51 bp, Emericella nidulans
gttctcgagacgagcgatcgcgtggtataacaagccatagtggaaaacagc

SEQ ID NO: 28278 - DNA, 45 bp, Emericella nidulans
gaattcactgcggccgccatgtcgctgatcgtgattttgctcagg

SEQ ID NO: 28279 - DNA, 52 bp, Emericella nidulans
gttctcgagacgagcgatcgctgctttctgagtccatatgctagtggatttg

SEQ ID NO: 28280 - DNA, 43 bp, Emericella nidulans
gaattcactgcggccgccatgtcgctggtaagcagctcgagga

SEQ ID NO: 28281 - DNA, 57 bp, Emericella nidulans
gttctcgagacgagcgatcgccaagaaacagtctatgtgtttcattcagtagataaa

SEQ ID NO: 28282 - DNA, 47 bp, Emericella nidulans
gaattcactgcggccgccatgcatcaagtctggtgatgctgctatcg

SEQ ID NO: 28283 - DNA, 57 bp, Emericella nidulans
gttctcgagacgagcgatcgcatcaactacataacaagtctaattccatttctttca

SEQ ID NO: 28284 - DNA, 41 bp, Emericella nidulans
gaattcactgcggccgccatgggaatcccgccagaccagca

SEQ ID NO: 28285 - DNA, 57 bp, Emericella nidulans
gttctcgagacgagcgatcgctagataaaggatagaactatcataacaccgtcaagg

SEQ ID NO: 28286 - DNA, 41 bp, Emericella nidulans; identical to SEQ ID NO: 28284

SEQ ID NO: 28287 - DNA, 57 bp, Emericella nidulans; identical to SEQ ID NO: 28285

SEQ ID NO: 28288 - DNA, 41 bp, Emericella nidulans; identical to SEQ ID NO: 28284

SEQ ID NO: 28289 - DNA, 57 bp, Emericella nidulans; identical to SEQ ID NO: 28285

SEQ ID NO: 28290 - DNA, 41 bp, Emericella nidulans; identical to SEQ ID NO: 28284

SEQ ID NO: 28291 - DNA, 57 bp, Emericella nidulans
gttctcgagacgagcgatcgccagtagataaaggatagaactatcataacaccgtca

SEQ ID NO: 28292 - DNA, 41 bp, Emericella nidulans; identical to SEQ ID NO: 28284

SEQ ID NO: 28293 - DNA, 57 bp, Emericella nidulans; identical to SEQ ID NO: 28291

SEQ ID NO: 28294 - DNA, 41 bp, Emericella nidulans
gaattcactgcggccgccatgtcgtgacgacgagccggttt

SEQ ID NO: 28295 - DNA, 57 bp, Emericella nidulans
gttctcgagacgagcgatcgctacataaagatgctattatcgatatttgtaggcaat

SEQ ID NO: 28296 - DNA, 45 bp, Emericella nidulans
gaattcactgcggccgccatgcctttctcgtcattttgggctgga

SEQ ID NO: 28297 - DNA, 42 bp, Emericella nidulans
gttctcgagacgagcgatcgctgcctgcggaaagagcagggt

SEQ ID NO: 28298 - DNA, 52 bp, Emericella nidulans
gaattcactgcggccgccatgtagatccgaaggagaagtcaaaagttggagg

SEQ ID NO: 28299 - DNA, 45 bp, Emericella nidulans
gttctcgagacgagcgatcgccccttttcaatgagatcgccggta

SEQ ID NO: 28300 - DNA, 41 bp, Emericella nidulans
gaattcactgcggccgccatgcctcggcgctcaggttgtca

SEQ ID NO: 28301 - DNA, 46 bp, Emericella nidulans
gttctcgagacgagcgatcgctaattcgtctacccacccgaaagaa

SEQ ID NO: 28302 - DNA, 54 bp, Emericella nidulans
gaattcactgcggccgccatggccaagtataatcatcgttactaaggggtctgc

SEQ ID NO: 28303 - DNA, 50 bp, Emericella nidulans
gttctcgagacgagcgatcgctgggataattagcttgtttcgatttagcg

SEQ ID NO: 28304 - DNA, 41 bp, Emericella nidulans
gaattcactgcggccgccatgcagcgccctcacgtcatcgt

SEQ ID NO: 28305 - DNA, 45 bp, Emericella nidulans
gttctcgagacgagcgatcgccgctccttcctctgttttcgcttg

SEQ ID NO: 28306 - DNA, 53 bp, Emericella nidulans
gaattcactgcggccgccatgctgacaatcagtctacaataggcgttaagtca

SEQ ID NO: 28307 - DNA, 57 bp, Emericella nidulans
gttctcgagacgagcgatcgctacaagaaaacatccttttatcaagtgcaatatacc

SEQ ID NO: 28308 - DNA, 41 bp, Emericella nidulans
gaattcactgcggccgccatgtcgcggcggagaagaaggtg

SEQ ID NO: 28309 - DNA, 47 bp, Emericella nidulans
gttctcgagacgagcgatcgctgatcgtagccggcgtagataaacga

SEQ ID NO: 28310 - DNA, 41 bp, Emericella nidulans
gaattcactgcggccgccatggcccatggcccctctacctt

SEQ ID NO: 28311 - DNA, 41 bp, Emericella nidulans
gttctcgagacgagcgatcgctgtcgctccagagccaacca

SEQ ID NO: 28312 - DNA, 41 bp, Emericella nidulans
gaattcactgcggccgccatgtcgacctcaacagccgcaca

SEQ ID NO: 28313 - DNA, 42 bp, Emericella nidulans
gttctcgagacgagcgatcgctccgcagaaggtgcagacgta

SEQ ID NO: 28314 - DNA, 47 bp, Emericella nidulans
gaattcactgcggccgccatgtgcgagcaaatactgataccaaatgc

SEQ ID NO: 28315 - DNA, 57 bp, Emericella nidulans
gttctcgagacgagcgatcgctttttatcatatattggacatgataagttgaagacc

SEQ ID NO: 28316 - DNA, 55 bp, Emericella nidulans
gaattcactgcggccgccatgaggaacataaaataattcttatccaccaacagca

SEQ ID NO: 28317 - DNA, 54 bp, Emericella nidulans
gttctcgagacgagcgatcgcagtcctttgtgaagcaggcctagcatactcatc

SEQ ID NO: 28318 - DNA, 41 bp, Emericella nidulans
gaattcactgcggccgccatggctggccggcggcttacata

SEQ ID NO: 28319 - DNA, 47 bp, Emericella nidulans
gttctcgagacgagcgatcgcagagatcgttacctgcactccgcttg

SEQ ID NO: 28320 - DNA, 43 bp, Emericella nidulans
gaattcactgcggccgccatgggtcatgatgaccggccgttgt

SEQ ID NO: 28321 - DNA, 51 bp, Emericella nidulans
gttctcgagacgagcgatcgccgaacgtataggcaggatcatatacaactt

SEQ ID NO: 28322 - DNA, 49 bp, Emericella nidulans
gaattcactgcggccgccatgatgctagctagacggatacatagcgaga

SEQ ID NO: 28323 - DNA, 46 bp, Emericella nidulans
gttctcgagacgagcgatcgctgatcacgacgatttacgaccacca

SEQ ID NO: 28324 - DNA, 44 bp, Emericella nidulans
gaattcactgcggccgccatgggtcaggacggtgcagaacagga

SEQ ID NO: 28325 - DNA, 55 bp, Emericella nidulans
gttctcgagacgagcgatcgctgtctaatgcgataattcttcgttaactgagtgc

SEQ ID NO: 28326 - DNA, 41 bp, Emericella nidulans
gaattcactgcggccgccatggccggccttgacgatgagga

SEQ ID NO: 28327 - DNA, 41 bp, Emericella nidulans
gttctcgagacgagcgatcgcgccttggccctgcagcatct

SEQ ID NO: 28328 - DNA, 42 bp, Emericella nidulans
gaattcactgcggccgccatgcgctcaagtaaccggcgcaac

SEQ ID NO: 28329 - DNA, 43 bp, Emericella nidulans
gttctcgagacgagcgatcgcctcccgggcacatagactcaag

SEQ ID NO: 28330 - DNA, 42 bp, Emericella nidulans; identical to SEQ ID NO: 28328

SEQ ID NO: 28331 - DNA, 43 bp, Emericella nidulans; identical to SEQ ID NO: 28329

SEQ ID NO: 28332 - DNA, 41 bp, Emericella nidulans
gaattcactgcggccgccatggcgaatctctcgcccagcaa

SEQ ID NO: 28333 - DNA, 41 bp, Emericella nidulans
gttctcgagacgagcgatcgcaccaacggcgagccacctgt

SEQ ID NO: 28334 - DNA, 44 bp, Emericella nidulans
gaattcactgcggccgccatgcgcttcccaatgcttcaataacg

SEQ ID NO: 28335 - DNA, 41 bp, Emericella nidulans
gttctcgagacgagcgatcgctagtgcggcgcgacgttgtc

SEQ ID NO: 28336 - DNA, 41 bp, Emericella nidulans
gaattcactgcggccgccatgtctctcgcggcgcagcaaat

SEQ ID NO: 28337 - DNA, 41 bp, Emericella nidulans
gttctcgagacgagcgatcgccggccttcagccgagtcgag

SEQ ID NO: 28338 - DNA, 41 bp, Emericella nidulans
gaattcactgcggccgccatgtttgcaagcgggttggggtg

SEQ ID NO: 28339 - DNA, 46 bp, Emericella nidulans
gttctcgagacgagcgatcgctcctccgttagagagcctgaagtcc

SEQ ID NO: 28340 - DNA, 41 bp, Emericella nidulans
gaattcactgcggccgccatgcggccctgggaagaaggtca

SEQ ID NO: 28341 - DNA, 41 bp, Emericella nidulans
gttctcgagacgagcgatcgcgccatgggcgcacactcgta

SEQ ID NO: 28342 - DNA, 43 bp, Emericella nidulans
gaattcactgcggccgccatgcgctatcaacgggttgggttgg

SEQ ID NO: 28343 - DNA, 57 bp, Emericella nidulans
gttctcgagacgagcgatcgctgagaagacaaatatacacagagtttactttcaaga

SEQ ID NO: 28344 - DNA, 41 bp, Emericella nidulans
gaattcactgcggccgccatgctctggcggccccgtcacta

SEQ ID NO: 28345 - DNA, 46 bp, Emericella nidulans
gttctcgagacgagcgatcgccgtgtaagcaaggacattgctgctg

SEQ ID NO: 28346 - DNA, 41 bp, Emericella nidulans; identical to SEQ ID NO: 28344

SEQ ID NO: 28347 - DNA, 46 bp, Emericella nidulans; identical to SEQ ID NO: 28345

SEQ ID NO: 28348 - DNA, 41 bp, Emericella nidulans
gaattcactgcggccgccatgccgccaacgctcgcagaact

SEQ ID NO: 28349 - DNA, 41 bp, Emericella nidulans
gttctcgagacgagcgatcgcgcgctcccattctgccatga

SEQ ID NO: 28350 - DNA, 53 bp, Emericella nidulans
gaattcactgcggccgccatgttaccgttgaggacagtatttctggtgctctg

SEQ ID NO: 28351 - DNA, 46 bp, Emericella nidulans; identical to SEQ ID NO: 28301

SEQ ID NO: 28352 - DNA, 42 bp, Emericella nidulans
gaattcactgcggccgccatgtcgcgaccgtattgtcgaggc

SEQ ID NO: 28353 - DNA, 41 bp, Emericella nidulans
gttctcgagacgagcgatcgcgtgtccgtcggcccccagtt

SEQ ID NO: 28354 - DNA, 44 bp, Emericella nidulans
gaattcactgcggccgccatgccatccgaccaacactctggctc

SEQ ID NO: 28355 - DNA, 54 bp, Emericella nidulans
gttctcgagacgagcgatcgcttccctagcaatatattatggcaaggggtaggc

SEQ ID NO: 28356 - DNA, 41 bp, Emericella nidulans
gaattcactgcggccgccatgagggctcggcgtcctcaatg

SEQ ID NO: 28357 - DNA, 41 bp, Emericella nidulans
gttctcgagacgagcgatcgcagaggcgagcaggccggatt

SEQ ID NO: 28358 - DNA, 41 bp, Emericella nidulans
gaattcactgcggccgccatgacgacgactccgtgcgcaaa

SEQ ID NO: 28359 - DNA, 44 bp, Emericella nidulans
gttctcgagacgagcgatcgcccatttcattcgcctggctaaac

SEQ ID NO: 28360 - DNA, 47 bp, Emericella nidulans
gaattcactgcggccgccatgtgatcatgccgaatatctgggctttt

SEQ ID NO: 28361 - DNA, 51 bp, Emericella nidulans
gttctcgagacgagcgatcgcactcttgaaaagatctctcgttctctaccc

SEQ ID NO: 28362 - DNA, 41 bp, Emericella nidulans
gaattcactgcggccgccatggtacgccgccctgtccgatg

SEQ ID NO: 28363 - DNA, 52 bp, Emericella nidulans
gttctcgagacgagcgatcgcaatcactgtctatatgcaacaaatcatgcag

SEQ ID NO: 28364 - DNA, 44 bp, Emericella nidulans
gaattcactgcggccgccatgcggttacccgtctcaaccggact

SEQ ID NO: 28365 - DNA, 46 bp, Emericella nidulans
gttctcgagacgagcgatcgccatggtttcgtcatgaagtgcaacg

SEQ ID NO: 28366 - DNA, 51 bp, Emericella nidulans
gaattcactgcggccgccatgttcaatccacaagaaccatacaaaatggtg

SEQ ID NO: 28367 - DNA, 41 bp, Emericella nidulans
gttctcgagacgagcgatcgcgcggcaattccaccgctgtt

SEQ ID NO: 28368 - DNA, 41 bp, Emericella nidulans
gaattcactgcggccgccatgagcccctggaagccggacag

SEQ ID NO: 28369 - DNA, 57 bp, Emericella nidulans
gttctcgagacgagcgatcgccacagtttcattcttatcataagtatcaccgccatc

SEQ ID NO: 28370 - DNA, 52 bp, Emericella nidulans
gaattcactgcggccgccatggtctcctaccacctgaatatgtactccatcg

SEQ ID NO: 28371 - DNA, 53 bp, Emericella nidulans
gttctcgagacgagcgatcgcacctttagctggtagctagcattgagatatga

SEQ ID NO: 28372 - DNA, 47 bp, Emericella nidulans
gaattcactgcggccgccatgcctgataaggcaggtctcagggatca

SEQ ID NO: 28373 - DNA, 43 bp, Emericella nidulans
gttctcgagacgagcgatcgccgtccctctcactgacccacca

SEQ ID NO: 28374 - DNA, 41 bp, Emericella nidulans
gaattcactgcggccgccatgctctgcggcttcggcgactc

SEQ ID NO: 28375 - DNA, 42 bp, Emericella nidulans
gttctcgagacgagcgatcgcgatcgaaaccaaccccggtca

SEQ ID NO: 28376 - DNA, 46 bp, Emericella nidulans
gaattcactgcggccgccatgtgctctcgaaagacaactgtcagca

SEQ ID NO: 28377 - DNA, 57 bp, Emericella nidulans
gttctcgagacgagcgatcgcatatgaacagcatgctagataaaactatgtacaaca

SEQ ID NO: 28378 - DNA, 49 bp, Emericella nidulans
gaattcactgcggccgccatgatatcacggtgcactataagggcggtct

SEQ ID NO: 28379 - DNA, 54 bp, Emericella nidulans
gttctcgagacgagcgatcgcgtattcctattagagccatgggcatatccaagt

SEQ ID NO: 28380 - DNA, 42 bp, Emericella nidulans
gaattcactgcggccgccatgtccggctcttcgctctcgttc

SEQ ID NO: 28381 - DNA, 43 bp, Emericella nidulans
gttctcgagacgagcgatcgctcctcgatcgcatcgagctcct

SEQ ID NO: 28382 - DNA, 46 bp, Emericella nidulans
gaattcactgcggccgccatgtagacgacgaggttgaattccaagg

SEQ ID NO: 28383 - DNA, 46 bp, Emericella nidulans; identical to SEQ ID NO: 28345

SEQ ID NO: 28384 - DNA, 42 bp, Emericella nidulans
gaattcactgcggccgccatgagcggacgctgttccctcgat

SEQ ID NO: 28385 - DNA, 44 bp, Emericella nidulans
gttctcgagacgagcgatcgccgctcgatctgaaaagcccttgg

SEQ ID NO: 28386 - DNA, 45 bp, Emericella nidulans
gaattcactgcggccgccatggcaagtctgatgccaagctgctca

SEQ ID NO: 28387 - DNA, 51 bp, Emericella nidulans
gttctcgagacgagcgatcgcggcccctagtgtgattatacacattgttga

SEQ ID NO: 28388 - DNA, 45 bp, Emericella nidulans
gaattcactgcggccgccatgtcacaatcgactgcgcgatacaga

SEQ ID NO: 28389 - DNA, 52 bp, Emericella nidulans
gttctcgagacgagcgatcgccttctcaatctcctctaaaatcgtgctctcc

SEQ ID NO: 28390 - DNA, 41 bp, Emericella nidulans
gaattcactgcggccgccatggcagcgcgggttgtcgagat

SEQ ID NO: 28391 - DNA, 53 bp, Emericella nidulans
gttctcgagacgagcgatcgctaatgcgataattcttcgttaactgagtgcaa

SEQ ID NO: 28392 - DNA, 40 bp, Emericella nidulans
gaattcactgcggccgccatgcccagtgccgctcccccta

SEQ ID NO: 28393 - DNA, 49 bp, Emericella nidulans
gttctcgagacgagcgatcgcatcgctagcttacattgcaaatcattca

SEQ ID NO: 28394 - DNA, 47 bp, Emericella nidulans
gaattcactgcggccgccatgggcccagattccagatctatcgcaag

SEQ ID NO: 28395 - DNA, 51 bp, Emericella nidulans
gttctcgagacgagcgatcgctgtaaggtagaatcattccgtcttgagttg

SEQ ID NO: 28396 - DNA, 47 bp, Emericella nidulans
gaattcactgcggccgccatgtgaggaagagatgcaccaggtctacg

SEQ ID NO: 28397 - DNA, 49 bp, Emericella nidulans
gttctcgagacgagcgatcgctttttggtgggaattactgcttcatatc

SEQ ID NO: 28398 - DNA, 44 bp, Emericella nidulans
gaattcactgcggccgccatgcgctccaaagaagcagcaaggtg

SEQ ID NO: 28399 - DNA, 51 bp, Emericella nidulans
gttctcgagacgagcgatcgcgggagaaaggtttatagtacattcggctaa

SEQ ID NO: 28400 - DNA, 41 bp, Emericella nidulans
gaattcactgcggccgccatgcgcatcgaatcgcctcccac

SEQ ID NO: 28401 - DNA, 40 bp, Emericella nidulans
gttctcgagacgagcgatcgcacgccaggcctgccccata

SEQ ID NO: 28402 - DNA, 50 bp, Emericella nidulans
gaattcactgcggccgccatgtgtcttgctatacactcgttgcactttgc

SEQ ID NO: 28403 - DNA, 41 bp, Emericella nidulans
gttctcgagacgagcgatcgcggcgaccgccagaggtgttg

SEQ ID NO: 28404 - DNA, 44 bp, Emericella nidulans
gaattcactgcggccgccatgcgcgcgcttcatatacagccaac

SEQ ID NO: 28405 - DNA, 49 bp, Emericella nidulans
gttctcgagacgagcgatcgcatagagagcttaagcaaggaccggcaag

SEQ ID NO: 28406 - DNA, 42 bp, Emericella nidulans
gaattcactgcggccgccatgtgacaccacccttcccgcaaa

SEQ ID NO: 28407 - DNA, 43 bp, Emericella nidulans
gttctcgagacgagcgatcgcgccaaaaacatcccaaccctca

SEQ ID NO: 28408 - DNA, 42 bp, Emericella nidulans
gaattcactgcggccgccatgccagatggatggattcgcaga

SEQ ID NO: 28409 - DNA, 49 bp, Emericella nidulans
gttctcgagacgagcgatcgcgtttccaagatttgtaattggcgtgtgc

SEQ ID NO: 28410 - DNA, 46 bp, Emericella nidulans
gaattcactgcggccgccatgcgccatcagcaatgagctttatgtg

SEQ ID NO: 28411 - DNA, 56 bp, Emericella nidulans
gttctcgagacgagcgatcgcgtcttaatttgtacatgagtcgatagcagggctac

SEQ ID NO: 28412 - DNA, 41 bp, Emericella nidulans
gaattcactgcggccgccatgcgccgctgtgtgctgacctc

SEQ ID NO: 28413 - DNA, 44 bp, Emericella nidulans
gttctcgagacgagcgatcgctcgccacatacatcgcaagacca

SEQ ID NO: 28414 - DNA, 43 bp, Emericella nidulans
gaattcactgcggccgccatgcacccctgggacatgaatgaca

SEQ ID NO: 28415 - DNA, 57 bp, Emericella nidulans
gttctcgagacgagcgatcgctttatgtacaatttagaaccataagcatagacatcc

SEQ ID NO: 28416 - DNA, 50 bp, Emericella nidulans
gaattcactgcggccgccatgtcttcttttgaaccattctccttcccaaa

SEQ ID NO: 28417 - DNA, 46 bp, Emericella nidulans
gttctcgagacgagcgatcgcgcagcaacctcaagaacgaaagagg

SEQ ID NO: 28418 - DNA, 43 bp, Emericella nidulans; identical to SEQ ID NO: 28414

SEQ ID NO: 28419 - DNA, 57 bp, Emericella nidulans
gttctcgagacgagcgatcgcgctactcatttatgtacaatttagaaccataagcat

SEQ ID NO: 28420 - DNA, 54 bp, Emericella nidulans
gaattcactgcggccgccatgcctcagatactggtcacttcagtatggttaggt

SEQ ID NO: 28421 - DNA, 41 bp, Emericella nidulans
gttctcgagacgagcgatcgcgcagcaacgccaagcggaat

SEQ ID NO: 28422 - DNA, 52 bp, Emericella nidulans
gaattcactgcggccgccatgtcattactatcggcgtccctatactacttca

SEQ ID NO: 28423 - DNA, 46 bp, Emericella nidulans
gttctcgagacgagcgatcgcccttcaccattaccatcgtcggcac

SEQ ID NO: 28424 - DNA, 53 bp, Emericella nidulans
gaattcactgcggccgccatgtaattgatcgattaatagtgaaatcggcatcg

SEQ ID NO: 28425 - DNA, 42 bp, Emericella nidulans
gttctcgagacgagcgatcgcggcggctagtccaggctttgg

SEQ ID NO: 28426 - DNA, 41 bp, Emericella nidulans
gaattcactgcggccgccatgacgcaaacgcccgcgatgat

SEQ ID NO: 28427 - DNA, 56 bp, Emericella nidulans
gttctcgagacgagcgatcgcgaagatgattcaatcagtctgtttctgtgtagtga

SEQ ID NO: 28428 - DNA, 41 bp, Emericella nidulans
gaattcactgcggccgccatgtggcttccgtcccgagtgtg

SEQ ID NO: 28429 - DNA, 45 bp, Emericella nidulans
gttctcgagacgagcgatcgctgaacgaaagcctgcttcaactgg

SEQ ID NO: 28430 - DNA, 42 bp, Emericella nidulans
gaattcactgcggccgccatgaccatggcttccgtcccgagt

SEQ ID NO: 28431 - DNA, 45 bp, Emericella nidulans; identical to SEQ ID NO: 28429

SEQ ID NO: 28432 - DNA, 43 bp, Emericella nidulans
gaattcactgcggccgccatgcaaaccaaaacacgccccgact

SEQ ID NO: 28433 - DNA, 41 bp, Emericella nidulans
gttctcgagacgagcgatcgcttgggaccggatcagcccac

SEQ ID NO: 28434 - DNA, 41 bp, Emericella nidulans
gaattcactgcggccgccatgcctcaatgcccaccgcctca

SEQ ID NO: 28435 - DNA, 41 bp, Emericella nidulans
gttctcgagacgagcgatcgcctgagccccaggccaccaag

SEQ ID NO: 28436 - DNA, 55 bp, Emericella nidulans
gaattcactgcggccgccatgaaagaagtagcgagattgcttcgtcgcatatgtt

SEQ ID NO: 28437 - DNA, 45 bp, Emericella nidulans
gttctcgagacgagcgatcgcgcgagatgaatgggaaatgactcg

SEQ ID NO: 28438 - DNA, 41 bp, Emericella nidulans
gaattcactgcggccgccatgaatgcgctgcggccaaactc

SEQ ID NO: 28439 - DNA, 47 bp, Emericella nidulans
gttctcgagacgagcgatcgccgcagacgactgtaataaatcgcacc

SEQ ID NO: 28440 - DNA, 41 bp, Emericella nidulans
gaattcactgcggccgccatgccccacgcaagaccacgaga

SEQ ID NO: 28441 - DNA, 56 bp, Emericella nidulans
gttctcgagacgagcgatcgcctaatagctagaagagtacatgtgaaagagtgcaa

SEQ ID NO: 28442 - DNA, 48 bp, Emericella nidulans
gaattcactgcggccgccatgtagcattgccatgccattacattattc

SEQ ID NO: 28443 - DNA, 50 bp, Emericella nidulans
gttctcgagacgagcgatcgcgcggttcatagtgtacagccagaacaaca

SEQ ID NO: 28444 - DNA, 52 bp, Emericella nidulans
gaattcactgcggccgccatgattagtctcgagtctcagggctagagaagga

SEQ ID NO: 28445 - DNA, 42 bp, Emericella nidulans
gttctcgagacgagcgatcgccgagtccagctcgacgacggt

SEQ ID NO: 28446 - DNA, 51 bp, Emericella nidulans
gaattcactgcggccgccatgaccactgtcttcggacagataccataaagc

SEQ ID NO: 28447 - DNA, 41 bp, Emericella nidulans
gttctcgagacgagcgatcgcccaacccgggcgatcggtta

SEQ ID NO: 28448 - DNA, 42 bp, Emericella nidulans
gaattcactgcggccgccatgtcaacggcaaatccgcattca

SEQ ID NO: 28449 - DNA, 56 bp, Emericella nidulans
gttctcgagacgagcgatcgccataaccgtgggaatgtgtatataatcagacatcg

SEQ ID NO: 28450 - DNA, 44 bp, Emericella nidulans
gaattcactgcggccgccatgcgacgcaggtgatgatgaagacg

SEQ ID NO: 28451 - DNA, 41 bp, Emericella nidulans
gttctcgagacgagcgatcgcaatcaccccgcgcgtattgg

SEQ ID NO: 28452 - DNA, 54 bp, Emericella nidulans
gaattcactgcggccgccatgtactcttattcatagtgaggtgctcaagggtgg

SEQ ID NO: 28453 - DNA, 45 bp, Emericella nidulans
gttctcgagacgagcgatcgctggacatccccagaagaaaagcaa

SEQ ID NO: 28454 - DNA, 54 bp, Emericella nidulans; identical to SEQ ID NO: 28452

SEQ ID NO: 28455 - DNA, 45 bp, Emericella nidulans; identical to SEQ ID NO: 28453

SEQ ID NO: 28456 - DNA, 54 bp, Emericella nidulans; identical to SEQ ID NO: 28452

SEQ ID NO: 28457 - DNA, 45 bp, Emericella nidulans; identical to SEQ ID NO: 28453

SEQ ID NO: 28458 - DNA, 42 bp, Emericella nidulans
gaattcactgcggccgccatgtcaccgccgtatcacggccta

SEQ ID NO: 28459 - DNA, 44 bp, Emericella nidulans
gttctcgagacgagcgatcgctgccttacaattcgccgttgtgc

SEQ ID NO: 28460 - DNA, 46 bp, Emericella nidulans
gaattcactgcggccgccatgcaagtgcatcgcctatcaatcatgt

SEQ ID NO: 28461 - DNA, 41 bp, Emericella nidulans
gttctcgagacgagcgatcgcttccgccttcccccattggt

SEQ ID NO: 28462 - DNA, 49 bp, Emericella nidulans
gaattcactgcggccgccatgtgcgttttgcttattgtgcttagctatt

SEQ ID NO: 28463 - DNA, 50 bp, Emericella nidulans
gttctcgagacgagcgatcgcattgattctggatacgttagttcctgagc

SEQ ID NO: 28464 - DNA, 51 bp, Emericella nidulans
gaattcactgcggccgccatgtctcttctagaagggttcaaggatgaaacg

SEQ ID NO: 28465 - DNA, 44 bp, Emericella nidulans
gttctcgagacgagcgatcgccggcatgcatagtgttcactccc

SEQ ID NO: 28466 - DNA, 43 bp, Emericella nidulans
gaattcactgcggccgccatgtcatcagccgcactgttgaccc

SEQ ID NO: 28467 - DNA, 52 bp, Emericella nidulans
gttctcgagacgagcgatcgctgcggaaataaaaggagatcatatctaaaaa

SEQ ID NO: 28468 - DNA, 57 bp, Emericella nidulans
gaattcactgcggccgccatgctagtgaatcaggtaaaccatgacttccgtcgacat

SEQ ID NO: 28469 - DNA, 41 bp, Emericella nidulans
gttctcgagacgagcgatcgctctccggctgtcgccgtctt

SEQ ID NO: 28470 - DNA, 49 bp, Emericella nidulans
gaattcactgcggccgccatgtttttacggcttgattcgttgtgtagtc

SEQ ID NO: 28471 - DNA, 42 bp, Emericella nidulans
gttctcgagacgagcgatcgctccagcgctttgcttccgttg

SEQ ID NO: 28472 - DNA, 41 bp, Emericella nidulans
gaattcactgcggccgccatgcgggacggctattgcccaag

SEQ ID NO: 28473 - DNA, 41 bp, Emericella nidulans
gttctcgagacgagcgatcgcgttgtcgccgcgagtccctc

SEQ ID NO: 28474 - DNA, 42 bp, Emericella nidulans
gaattcactgcggccgccatggggtgccgctgctacatcacg

SEQ ID NO: 28475 - DNA, 57 bp, Emericella nidulans
gttctcgagacgagcgatcgcatacattgatatctactacttgactaactccgccta

SEQ ID NO: 28476 - DNA, 41 bp, Emericella nidulans
gaattcactgcggccgccatgggcaagcagcccggaaaaga

SEQ ID NO: 28477 - DNA, 48 bp, Emericella nidulans
gttctcgagacgagcgatcgccacctctgtggaccttgtatgctttga

SEQ ID NO: 28478 - DNA, 49 bp, Emericella nidulans
gaattcactgcggccgccatgccgaagaagcattatttagcctcagagc

SEQ ID NO: 28479 - DNA, 41 bp, Emericella nidulans
gttctcgagacgagcgatcgcttcgtgccacgttcgaaacc

SEQ ID NO: 28480 - DNA, 41 bp, Emericella nidulans
gaattcactgcggccgccatgccgcattctgcagctggtca

SEQ ID NO: 28481 - DNA, 52 bp, Emericella nidulans
gttctcgagacgagcgatcgctatctatgcaagaacaggtcgctaatacatc

SEQ ID NO: 28482 - DNA, 42 bp, Emericella nidulans
gaattcactgcggccgccatgcccaacaatccctggcctcca

SEQ ID NO: 28483 - DNA, 47 bp, Emericella nidulans
gttctcgagacgagcgatcgcgggatcagatagtctcaaaccctcca

SEQ ID NO: 28484 - DNA, 48 bp, Emericella nidulans
gaattcactgcggccgccatgatgattctttgtttggaagagcccagt

SEQ ID NO: 28485 - DNA, 45 bp, Emericella nidulans
gttctcgagacgagcgatcgcgcgatgagcccctatacagcttgc

SEQ ID NO: 28486 - DNA, 45 bp, Emericella nidulans
gaattcactgcggccgccatgtctttaccgccaaggaccttgcat

SEQ ID NO: 28487 - DNA, 45 bp, Emericella nidulans
gttctcgagacgagcgatcgctcgatacacaaaagcgaccaaatg

SEQ ID NO: 28488 - DNA, 43 bp, Emericella nidulans
gaattcactgcggccgccatgcgcgaatctgaagcagccagga

SEQ ID NO: 28489 - DNA, 54 bp, Emericella nidulans
gttctcgagacgagcgatcgcgaaagtgttaaggggtatttgcgtatacatgct

SEQ ID NO: 28490 - DNA, 41 bp, Emericella nidulans
gaattcactgcggccgccatgtcatgcagcgaaagcggagg

SEQ ID NO: 28491 - DNA, 53 bp, Emericella nidulans
gttctcgagacgagcgatcgccatcttgtcaataaagaagaagagcatatcca

SEQ ID NO: 28492 - DNA, 42 bp, Emericella nidulans
gaattcactgcggccgccatgcgttgcctaattcggtacgtc

SEQ ID NO: 28493 - DNA, 43 bp, Emericella nidulans
gttctcgagacgagcgatcgcttgtggatcttgttaggcagag

SEQ ID NO: 28494 - DNA, 41 bp, Emericella nidulans
gaattcactgcggccgccatgcagccagtacgacaacctca

SEQ ID NO: 28495 - DNA, 47 bp, Emericella nidulans
gttctcgagacgagcgatcgcaagaggtattgcaatatgaatgaaaa

SEQ ID NO: 28496 - DNA, 42 bp, Emericella nidulans; identical to SEQ ID NO: 28492

SEQ ID NO: 28497 - DNA, 43 bp, Emericella nidulans; identical to SEQ ID NO: 28493

SEQ ID NO: 28498 - DNA, 42 bp, Emericella nidulans; identical to SEQ ID NO: 28492

SEQ ID NO: 28499 - DNA, 43 bp, Emericella nidulans; identical to SEQ ID NO: 28493

SEQ ID NO: 28500 - DNA, 40 bp, Emericella nidulans
gaattcactgcggccgccatgttcgtttccttgttgttgg

SEQ ID NO: 28501 - DNA, 47 bp, Emericella nidulans
gttctcgagacgagcgatcgcatacactgtcagtgtacatagctccc

SEQ ID NO: 28502 - DNA, 40 bp, Emericella nidulans
gaattcactgcggccgccatgcgactcgatcacggatttg

SEQ ID NO: 28503 - DNA, 46 bp, Emericella nidulans
gttctcgagacgagcgatcgcgatcatcaattcattagcttagtgc

SEQ ID NO: 28504 - DNA, 41 bp, Emericella nidulans
gaattcactgcggccgccatgcgtgtccaacgctctgaagt

SEQ ID NO: 28505 - DNA, 42 bp, Emericella nidulans
gttctcgagacgagcgatcgcttcgcaatttcatcaaatcat

SEQ ID NO: 28506 - DNA, 41 bp, Emericella nidulans; identical to SEQ ID NO: 28504

SEQ ID NO: 28507 - DNA, 42 bp, Emericella nidulans; identical to SEQ ID NO: 28505

SEQ ID NO: 28508 - DNA, 41 bp, Emericella nidulans
gaattcactgcggccgccatgggaggcgtcaataacttgga

SEQ ID NO: 28509 - DNA, 46 bp, Emericella nidulans
gttctcgagacgagcgatcgcaaatctcaaaacaactcatctagcc

SEQ ID NO: 28510 - DNA, 41 bp, Emericella nidulans
gaattcactgcggccgccatggatgaggtgcaaggtgcata

SEQ ID NO: 28511 - DNA, 42 bp, Emericella nidulans
gttctcgagacgagcgatcgcaaagcatgcagtcgttttaat

SEQ ID NO: 28512 - DNA, 41 bp, Emericella nidulans
gaattcactgcggccgccatgccgagaaagccaagctgtag

SEQ ID NO: 28513 - DNA, 46 bp, Emericella nidulans
gttctcgagacgagcgatcgctgccataaaagatatcaaatagaaa

SEQ ID NO: 28514 - DNA, 41 bp, Emericella nidulans
gaattcactgcggccgccatgctggcattctcacttgatcg

SEQ ID NO: 28515 - DNA, 42 bp, Emericella nidulans
gttctcgagacgagcgatcgcgcagtcgctaaaaatcatcca

SEQ ID NO: 28516 - DNA, 41 bp, Emericella nidulans
gaattcactgcggccgccatgtgtgcatttggtgatctggt

SEQ ID NO: 28517 - DNA, 42 bp, Emericella nidulans
gttctcgagacgagcgatcgctgcgtcaatatccatacagga

SEQ ID NO: 28518 - DNA, 42 bp, Emericella nidulans
gaattcactgcggccgccatgtgagtcaggtcatggttctca

SEQ ID NO: 28519 - DNA, 41 bp, Emericella nidulans
gttctcgagacgagcgatcgcatggatgttcaaaccgcact

SEQ ID NO: 28520 - DNA, 41 bp, Emericella nidulans
gaattcactgcggccgccatgcgaagaacgaccaaaaagaa

SEQ ID NO: 28521 - DNA, 43 bp, Emericella nidulans
gttctcgagacgagcgatcgcttggtcctaggcttcagaagat

SEQ ID NO: 28522 - DNA, 55 bp, Emericella nidulans
gaattcactgcggccgccatgtacttgatagattcaatattgtacttgacaaaag

SEQ ID NO: 28523 - DNA, 46 bp, Emericella nidulans
gttctcgagacgagcgatcgccagcatctttagttgcatctttctt

SEQ ID NO: 28524 - DNA, 50 bp, Emericella nidulans
gaattcactgcggccgccatgtacttagatgcataaaactgatatattct

SEQ ID NO: 28525 - DNA, 41 bp, Emericella nidulans
gttctcgagacgagcgatcgcgcagcagtcgacatgacatc

SEQ ID NO: 28526 - DNA, 41 bp, Emericella nidulans; identical to SEQ ID NO: 28516

SEQ ID NO: 28527 - DNA, 42 bp, Emericella nidulans
gttctcgagacgagcgatcgcttcattctgcgtcaatatcca

SEQ ID NO: 28528 - DNA, 41 bp, Emericella nidulans
gaattcactgcggccgccatgcaatttccaccatgcacaga

SEQ ID NO: 28529 - DNA, 51 bp, Emericella nidulans
gttctcgagacgagcgatcgcgtcttgagtatatgcactaaaccaggagta

SEQ ID NO: 28530 - DNA, 42 bp, Emericella nidulans
gaattcactgcggccgccatgtcggagctccagtatctcttg

SEQ ID NO: 28531 - DNA, 56 bp, Emericella nidulans
gttctcgagacgagcgatcgcggtatagatgacatttcatattatctgaagtagag

SEQ ID NO: 28532 - DNA, 41 bp, Emericella nidulans
gaattcactgcggccgccatgatttcttcagcctggtggtg

SEQ ID NO: 28533 - DNA, 41 bp, Emericella nidulans
gttctcgagacgagcgatcgctgaggcttgttgccagataa

SEQ ID NO: 28534 - DNA, 41 bp, Emericella nidulans
gaattcactgcggccgccatgcaaagttgtctcagcgcctc

SEQ ID NO: 28535 - DNA, 46 bp, Emericella nidulans
gttctcgagacgagcgatcgctgcatctaagcgattacatacaaat

SEQ ID NO: 28536 - DNA, 41 bp, Emericella nidulans
gaattcactgcggccgccatgtggtccagatggagtagctg

SEQ ID NO: 28537 - DNA, 56 bp, Emericella nidulans
gttctcgagacgagcgatcgcgaaggtcgagataatgaaatatctcgtaaataata

SEQ ID NO: 28538 - DNA, 41 bp, Emericella nidulans
gaattcactgcggccgccatggcatcgccatcctactcaat

SEQ ID NO: 28539 - DNA, 50 bp, Emericella nidulans
gttctcgagacgagcgatcgcaagtacaaagtcaagtttaaaaacacgta

SEQ ID NO: 28540 - DNA, 42 bp, Emericella nidulans
gaattcactgcggccgccatggcctcgttctgtttcttcctt

SEQ ID NO: 28541 - DNA, 54 bp, Emericella nidulans
gttctcgagacgagcgatcgctaacaaaaagatattaagattattaggtgatga

SEQ ID NO: 28542 - DNA, 41 bp, Emericella nidulans
gaattcactgcggccgccatgcagaagtcgccgcttatttg

SEQ ID NO: 28543 - DNA, 44 bp, Emericella nidulans
gttctcgagacgagcgatcgcgcgtttcaatattagatccttgg

SEQ ID NO: 28544 - DNA, 41 bp, Emericella nidulans
gaattcactgcggccgccatgggatctcaaactcccgaaaa

SEQ ID NO: 28545 - DNA, 41 bp, Emericella nidulans
gttctcgagacgagcgatcgctgaacaaaatcatcgcaagg

SEQ ID NO: 28546 - DNA, 41 bp, Emericella nidulans; identical to SEQ ID NO: 28544

SEQ ID NO: 28547 - DNA, 41 bp, Emericella nidulans; identical to SEQ ID NO: 28545

SEQ ID NO: 28548 - DNA, 41 bp, Emericella nidulans
gaattcactgcggccgccatgcagaccggatctcaaactcc

SEQ ID NO: 28549 - DNA, 41 bp, Emericella nidulans; identical to SEQ ID NO: 28545

SEQ ID NO: 28550 - DNA, 39 bp, Emericella nidulans
gaattcactgcggccgccatgacagggccgaccttctgg

SEQ ID NO: 28551 - DNA, 41 bp, Emericella nidulans
gttctcgagacgagcgatcgccaataccactgcatccttgc

SEQ ID NO: 28552 - DNA, 41 bp, Emericella nidulans
gaattcactgcggccgccatgctgacatccatgcagagcac

SEQ ID NO: 28553 - DNA, 45 bp, Emericella nidulans
gttctcgagacgagcgatcgcaagagcaaacattaggaatatgat

SEQ ID NO: 28554 - DNA, 41 bp, Emericella nidulans
gaattcactgcggccgccatgtggttcatcacggagagaca

SEQ ID NO: 28555 - DNA, 45 bp, Emericella nidulans
gttctcgagacgagcgatcgcaataaactgaggacgaagtatttg

SEQ ID NO: 28556 - DNA, 41 bp, Emericella nidulans
gaattcactgcggccgccatgccccgggtcgaatataaaga

SEQ ID NO: 28557 - DNA, 41 bp, Emericella nidulans
gttctcgagacgagcgatcgcacgctcttcaaccattcagg

SEQ ID NO: 28558 - DNA, 40 bp, Emericella nidulans
gaattcactgcggccgccatggcgtcgggatagcgacata

SEQ ID NO: 28559 - DNA, 41 bp, Emericella nidulans
gttctcgagacgagcgatcgcggctcgcttcaaataaccaa

SEQ ID NO: 28560 - DNA, 41 bp, Emericella nidulans
gaattcactgcggccgccatgaggtcctcataacccctgct

SEQ ID NO: 28561 - DNA, 41 bp, Emericella nidulans
gttctcgagacgagcgatcgctattcatgaacgggctaccg

SEQ ID NO: 28562 - DNA, 41 bp, Emericella nidulans
gaattcactgcggccgccatgcgacccgtgctttattcatt

SEQ ID NO: 28563 - DNA, 41 bp, Emericella nidulans
gttctcgagacgagcgatcgccgaatcgacgcagcttaata

SEQ ID NO: 28564 - DNA, 43 bp, Emericella nidulans
gaattcactgcggccgccatgtttgagcaatatccaaaacaga

SEQ ID NO: 28565 - DNA, 42 bp, Emericella nidulans
gttctcgagacgagcgatcgcgaaccgtatagccacctcaaa

SEQ ID NO: 28566 - DNA, 41 bp, Emericella nidulans
gaattcactgcggccgccatgacaaccccacgacaaagaac

SEQ ID NO: 28567 - DNA, 52 bp, Emericella nidulans
gttctcgagacgagcgatcgcattattatcattgataaatgccaaatgagtt

SEQ ID NO: 28568 - DNA, 41 bp, Emericella nidulans
gaattcactgcggccgccatggagaaaaagcaatgggacct

SEQ ID NO: 28569 - DNA, 41 bp, Emericella nidulans
gttctcgagacgagcgatcgcggctcagcgacgctaataaa

SEQ ID NO: 28570 - DNA, 41 bp, Emericella nidulans
gaattcactgcggccgccatgacctatgcgtcggatcaaat

SEQ ID NO: 28571 - DNA, 44 bp, Emericella nidulans
gttctcgagacgagcgatcgctcaggaatctgagaaacgtaaag

SEQ ID NO: 28572 - DNA, 41 bp, Emericella nidulans
gaattcactgcggccgccatggtagtcggggacacggatct

SEQ ID NO: 28573 - DNA, 43 bp, Emericella nidulans
gttctcgagacgagcgatcgctggaaagaagaggtggatcttt

SEQ ID NO: 28574 - DNA, 41 bp, Emericella nidulans
gaattcactgcggccgccatgtgcttaccgaccgtcgtact

SEQ ID NO: 28575 - DNA, 43 bp, Emericella nidulans
gttctcgagacgagcgatcgctgatgtatcgaccttgattcca

SEQ ID NO: 28576 - DNA, 42 bp, Emericella nidulans
gaattcactgcggccgccatgcacaaggtcaaccatggagtc

SEQ ID NO: 28577 - DNA, 45 bp, Emericella nidulans
gttctcgagacgagcgatcgcaaaaatgcataacaatgtatcgtg

SEQ ID NO: 28578 - DNA, 41 bp, Emericella nidulans
gaattcactgcggccgccatgtagtcgaaatgcgactcgtg

SEQ ID NO: 28579 - DNA, 42 bp, Emericella nidulans
gttctcgagacgagcgatcgctgcaacaataaaatggattgg

SEQ ID NO: 28580 - DNA, 41 bp, Emericella nidulans
gaattcactgcggccgccatgaggatgatctgtccgacctc

SEQ ID NO: 28581 - DNA, 42 bp, Emericella nidulans
gttctcgagacgagcgatcgccctgaaaaaggtgattgttga

SEQ ID NO: 28582 - DNA, 41 bp, Emericella nidulans
gaattcactgcggccgccatgttcttcttttcccgctttca

SEQ ID NO: 28583 - DNA, 41 bp, Emericella nidulans
gttctcgagacgagcgatcgcttcgaacaagagcaaaaacg

SEQ ID NO: 28584 - DNA, 43 bp, Emericella nidulans
gaattcactgcggccgccatgtctgtgaattaccctggactca

SEQ ID NO: 28585 - DNA, 42 bp, Emericella nidulans
gttctcgagacgagcgatcgctgctctaccgtcgtcaagttt

SEQ ID NO: 28586 - DNA, 41 bp, Emericella nidulans
gaattcactgcggccgccatgcagcgctactcggagatcat

SEQ ID NO: 28587 - DNA, 49 bp, Emericella nidulans
gttctcgagacgagcgatcgctcagagaagagaagatctattttagtcg

SEQ ID NO: 28588 - DNA, 41 bp, Emericella nidulans
gaattcactgcggccgccatgttggaggagatggaagatgg

SEQ ID NO: 28589 - DNA, 47 bp, Emericella nidulans
gttctcgagacgagcgatcgccatgtgtcatgacttatgaactttgt

SEQ ID NO: 28590 - DNA, 41 bp, Emericella nidulans
gaattcactgcggccgccatggcggttagaagagcaagagc

SEQ ID NO: 28591 - DNA, 43 bp, Emericella nidulans
gttctcgagacgagcgatcgccgcgagtctatagaatgcctaa

SEQ ID NO: 28592 - DNA, 45 bp, Emericella nidulans
gaattcactgcggccgccatggctttcaacctcactttaacttcc

SEQ ID NO: 28593 - DNA, 42 bp, Emericella nidulans
gttctcgagacgagcgatcgcaacgaatgaattcaaggcaaa

SEQ ID NO: 28594 - DNA, 41 bp, Emericella nidulans
gaattcactgcggccgccatgtcgaccaattctccaccttc

SEQ ID NO: 28595 - DNA, 56 bp, Emericella nidulans
gttctcgagacgagcgatcgcttactcagcattatatataaatctatctcatcgaa

SEQ ID NO: 28596 - DNA, 43 bp, Emericella nidulans
gaattcactgcggccgccatgcaggctgaagagaaatgtagca

SEQ ID NO: 28597 - DNA, 41 bp, Emericella nidulans
gttctcgagacgagcgatcgcttagcgtctgccatgaactg

SEQ ID NO: 28598 - DNA, 42 bp, Emericella nidulans
gaattcactgcggccgccatgcgaatctttgtgagccatacc

SEQ ID NO: 28599 - DNA, 46 bp, Emericella nidulans
gttctcgagacgagcgatcgcaccttacaaaatgtctagagaaaaa

SEQ ID NO: 28600 - DNA, 41 bp, Emericella nidulans
gaattcactgcggccgccatgtaagctgtggaacgtggaga

SEQ ID NO: 28601 - DNA, 42 bp, Emericella nidulans
gttctcgagacgagcgatcgcaagcggatgaaagctatgaca

SEQ ID NO: 28602 - DNA, 41 bp, Emericella nidulans
gaattcactgcggccgccatgaccctcgacagtagctggag

SEQ ID NO: 28603 - DNA, 50 bp, Emericella nidulans
gttctcgagacgagcgatcgcactgcatatgtatacatatctttgggtaa

SEQ ID NO: 28604 - DNA, 41 bp, Emericella nidulans
gaattcactgcggccgccatgctgcagttgaacctgaaccc

SEQ ID NO: 28605 - DNA, 50 bp, Emericella nidulans
gttctcgagacgagcgatcgccattgattatatacaaacaaacagacaaa

SEQ ID NO: 28606 - DNA, 41 bp, Emericella nidulans
gaattcactgcggccgccatgcggttagccaaggggtattt

SEQ ID NO: 28607 - DNA, 42 bp, Emericella nidulans
gttctcgagacgagcgatcgccactgcaggaggtaggagaaa

SEQ ID NO: 28608 - DNA, 41 bp, Emericella nidulans
gaattcactgcggccgccatgttagtcctcggcgtcaaatc

SEQ ID NO: 28609 - DNA, 42 bp, Emericella nidulans
gttctcgagacgagcgatcgccatctagacattaggcgacag

SEQ ID NO: 28610 - DNA, 41 bp, Emericella nidulans
gaattcactgcggccgccatggacacgtctgcgtctgtttc

SEQ ID NO: 28611 - DNA, 41 bp, Emericella nidulans
gttctcgagacgagcgatcgctcaaaccgaaaccaaaacct

SEQ ID NO: 28612 - DNA, 41 bp, Emericella nidulans; identical to SEQ ID NO: 28610

SEQ ID NO: 28613 - DNA, 41 bp, Emericella nidulans; identical to SEQ ID NO: 28611

SEQ ID NO: 28614 - DNA, 41 bp, Emericella nidulans; identical to SEQ ID NO: 28610

SEQ ID NO: 28615 - DNA, 41 bp, Emericella nidulans; identical to SEQ ID NO: 28611

SEQ ID NO: 28616 - DNA, 41 bp, Emericella nidulans; identical to SEQ ID NO: 28610

SEQ ID NO: 28617 - DNA, 41 bp, Emericella nidulans; identical to SEQ ID NO: 28611

SEQ ID NO: 28618 - DNA, 41 bp, Emericella nidulans
gaattcactgcggccgccatgtggggtaagtgcattcctgt

SEQ ID NO: 28619 - DNA, 47 bp, Emericella nidulans
gttctcgagacgagcgatcgcgtcgggtataatgttgattttagttc

SEQ ID NO: 28620 - DNA, 41 bp, Emericella nidulans
gaattcactgcggccgccatgttgcttgtggtgatcatcgt

SEQ ID NO: 28621 - DNA, 46 bp, Emericella nidulans
gttctcgagacgagcgatcgctgaagagacaggtatgataggttca

SEQ ID NO: 28622 - DNA, 40 bp, Emericella nidulans
gaattcactgcggccgccatgcctcgctcaggtcctcatt

SEQ ID NO: 28623 - DNA, 42 bp, Emericella nidulans
gttctcgagacgagcgatcgccgttctatcccaagttcaagc

SEQ ID NO: 28624 - DNA, 41 bp, Emericella nidulans
gaattcactgcggccgccatgcaggtgctgagccgagtatc

SEQ ID NO: 28625 - DNA, 40 bp, Emericella nidulans
gttctcgagacgagcgatcgcacgccagatattgcgtttg

SEQ ID NO: 28626 - DNA, 41 bp, Emericella nidulans
gaattcactgcggccgccatgtaatttttggcggcaacagc

SEQ ID NO: 28627 - DNA, 41 bp, Emericella nidulans
gttctcgagacgagcgatcgctcaggcacgttactctttgc

SEQ ID NO: 28628 - DNA, 41 bp, Emericella nidulans
gaattcactgcggccgccatggcttcaatccggccatctac

SEQ ID NO: 28629 - DNA, 42 bp, Emericella nidulans
gttctcgagacgagcgatcgcagtcgaggtttcaattgcttg

SEQ ID NO: 28630 - DNA, 41 bp, Emericella nidulans
gaattcactgcggccgccatggtgtctttgcctctggcttc

SEQ ID NO: 28631 - DNA, 43 bp, Emericella nidulans
gttctcgagacgagcgatcgctcgagctgagttcgatagattg

SEQ ID NO: 28632 - DNA, 41 bp, Emericella nidulans
gaattcactgcggccgccatgatgcggtacccccttctact

SEQ ID NO: 28633 - DNA, 46 bp, Emericella nidulans
gttctcgagacgagcgatcgctccaaatgatgtacaatagaaatgc

SEQ ID NO: 28634 - DNA, 41 bp, Emericella nidulans
gaattcactgcggccgccatgcaccgttccaaggataccag

SEQ ID NO: 28635 - DNA, 54 bp, Emericella nidulans
gttctcgagacgagcgatcgcacttggtataatttatttataatcctctacctg

SEQ ID NO: 28636 - DNA, 41 bp, Emericella nidulans
gaattcactgcggccgccatggatggactgaaggcaacacc

SEQ ID NO: 28637 - DNA, 48 bp, Emericella nidulans
gttctcgagacgagcgatcgcgagaaatatgttttcgtatacgcagtg

SEQ ID NO: 28638 - DNA, 41 bp, Emericella nidulans
gaattcactgcggccgccatgccaagattaccggcaaagaa

SEQ ID NO: 28639 - DNA, 41 bp, Emericella nidulans
gttctcgagacgagcgatcgcaaaaacgcaggggctagttt

SEQ ID NO: 28640 - DNA, 41 bp, Emericella nidulans
gaattcactgcggccgccatgtcccgcaatctgtgtatgac

SEQ ID NO: 28641 - DNA, 51 bp, Emericella nidulans
gttctcgagacgagcgatcgcaaaaaggctataactgatgctatatactac

SEQ ID NO: 28642 - DNA, 41 bp, Emericella nidulans; identical to SEQ ID NO: 28640

SEQ ID NO: 28643 - DNA, 51 bp, Emericella nidulans; identical to SEQ ID NO: 28641

SEQ ID NO: 28644 - DNA, 44 bp, Emericella nidulans
gaattcactgcggccgccatgcgaattgagcgatcaaatataca

SEQ ID NO: 28645 - DNA, 45 bp, Emericella nidulans
gttctcgagacgagcgatcgcgcatctttagttgcatctttcttg

SEQ ID NO: 28646 - DNA, 41 bp, Emericella nidulans
gaattcactgcggccgccatggagaacttggctcccaagaa

SEQ ID NO: 28647 - DNA, 48 bp, Emericella nidulans
gttctcgagacgagcgatcgcggaaagcaagtacgtatcataatttag

SEQ ID NO: 28648 - DNA, 41 bp, Emericella nidulans; identical to SEQ ID NO: 28646

SEQ ID NO: 28649 - DNA, 44 bp, Emericella nidulans
gttctcgagacgagcgatcgccataggaaagcaagtacgtatca

SEQ ID NO: 28650 - DNA, 42 bp, Emericella nidulans
gaattcactgcggccgccatgcagcaacaacagtatcgctga

SEQ ID NO: 28651 - DNA, 39 bp, Emericella nidulans
gttctcgagacgagcgatcgcaggcgtagtttggaggct

SEQ ID NO: 28652 - DNA, 41 bp, Emericella nidulans
gaattcactgcggccgccatggtgggtttttcttcgagcag

SEQ ID NO: 28653 - DNA, 41 bp, Emericella nidulans
gttctcgagacgagcgatcgccatttcatatgcgctcaacg

SEQ ID NO: 28654 - DNA, 39 bp, Emericella nidulans
gaattcactgcggccgccatggtccccgacagcatcacc

SEQ ID NO: 28655 - DNA, 55 bp, Emericella nidulans
gttctcgagacgagcgatcgctattaatgtatttattcgaacgaatttttatgac

SEQ ID NO: 28656 - DNA, 41 bp, Emericella nidulans
gaattcactgcggccgccatgcaacttggctgtgtcagctc

SEQ ID NO: 28657 - DNA, 46 bp, Emericella nidulans; identical to SEQ ID NO: 28621

SEQ ID NO: 28658 - DNA, 55 bp, Emericella nidulans
gaattcactgcggccgccatgcaattgagctttatatacaaactcttcacttcaa

SEQ ID NO: 28659 - DNA, 53 bp, Emericella nidulans
gttctcgagacgagcgatcgctttatgcaaatgtgtacaattgcttattctat

SEQ ID NO: 28660 - DNA, 41 bp, Emericella nidulans
gaattcactgcggccgccatggtcgccgctacaccatattt

SEQ ID NO: 28661 - DNA, 43 bp, Emericella nidulans
gttctcgagacgagcgatcgcccaaaaagtgcatctagaacga

SEQ ID NO: 28662 - DNA, 41 bp, Emericella nidulans
gaattcactgcggccgccatgtatcccagctagttgcccac

SEQ ID NO: 28663 - DNA, 50 bp, Emericella nidulans
gttctcgagacgagcgatcgctagaaatgcatatatgttatattatcagc

SEQ ID NO: 28664 - DNA, 49 bp, Emericella nidulans
gaattcactgcggccgccatgaagacatattttcttgtataataattgc

SEQ ID NO: 28665 - DNA, 41 bp, Emericella nidulans
gttctcgagacgagcgatcgcacgcgtattgcatttgtacg

SEQ ID NO: 28666 - DNA, 41 bp, Emericella nidulans
gaattcactgcggccgccatgggtctattgtgccaggtgct

SEQ ID NO: 28667 - DNA, 42 bp, Emericella nidulans
gttctcgagacgagcgatcgcgggaaaatgatattgcccaaa

SEQ ID NO: 28668 - DNA, 47 bp, Emericella nidulans
gaattcactgcggccgccatgtacagagcaatctaagacatattttc

SEQ ID NO: 28669 - DNA, 41 bp, Emericella nidulans; identical to SEQ ID NO: 28665

SEQ ID NO: 28670 - DNA, 47 bp, Emericella nidulans; identical to SEQ ID NO: 28668

SEQ ID NO: 28671 - DNA, 41 bp, Emericella nidulans; identical to SEQ ID NO: 28665

SEQ ID NO: 28672 - DNA, 42 bp, Emericella nidulans
gaattcactgcggccgccatgcgccgtacacatagtgagaca

SEQ ID NO: 28673 - DNA, 48 bp, Emericella nidulans
gttctcgagacgagcgatcgcgtgtaaattagtaaattgaaaatggtt

SEQ ID NO: 28674 - DNA, 42 bp, Emericella nidulans
gaattcactgcggccgccatgcgccaccgttccttaattatc

SEQ ID NO: 28675 - DNA, 41 bp, Emericella nidulans
gttctcgagacgagcgatcgcttgcagctatcctctccctc

SEQ ID NO: 28676 - DNA, 41 bp, Emericella nidulans
gaattcactgcggccgccatgagcagtcggatttcatcgtc

SEQ ID NO: 28677 - DNA, 42 bp, Emericella nidulans
gttctcgagacgagcgatcgcgcgcgaaaagatatttgattg

SEQ ID NO: 28678 - DNA, 41 bp, Emericella nidulans
gaattcactgcggccgccatgaccagcatggcattgaatct

SEQ ID NO: 28679 - DNA, 41 bp, Emericella nidulans
gttctcgagacgagcgatcgctacgcattcaccgtgatctt

SEQ ID NO: 28680 - DNA, 40 bp, Emericella nidulans
gaattcactgcggccgccatgcaaaaatgggtgccattcc

SEQ ID NO: 28681 - DNA, 44 bp, Emericella nidulans
gttctcgagacgagcgatcgcaaccattcaaggttaaatcaacg

SEQ ID NO: 28682 - DNA, 41 bp, Emericella nidulans
gaattcactgcggccgccatgggccagcccctgttatagta

SEQ ID NO: 28683 - DNA, 50 bp, Emericella nidulans
gttctcgagacgagcgatcgcatatatcttcatattggatatatctgtgc

SEQ ID NO: 28684 - DNA, 41 bp, Emericella nidulans
gaattcactgcggccgccatggttttggagtttccctgctg

SEQ ID NO: 28685 - DNA, 41 bp, Emericella nidulans
gttctcgagacgagcgatcgcatcagactgctcatgctttc

SEQ ID NO: 28686 - DNA, 41 bp, Emericella nidulans
gaattcactgcggccgccatgtcccagtctaggaagcgtgt

SEQ ID NO: 28687 - DNA, 43 bp, Emericella nidulans
gttctcgagacgagcgatcgctgcctcaactaggaaagaacaa

SEQ ID NO: 28688 - DNA, 41 bp, Emericella nidulans
gaattcactgcggccgccatgcagcatggaacttgacgaga

SEQ ID NO: 28689 - DNA, 41 bp, Emericella nidulans
gttctcgagacgagcgatcgcagtgcctatcgagctcaacc

SEQ ID NO: 28690 - DNA, 41 bp, Emericella nidulans
gaattcactgcggccgccatgccgcacatgcaattttctta

SEQ ID NO: 28691 - DNA, 41 bp, Emericella nidulans
gttctcgagacgagcgatcgccattgctaagtttgcgtgga

SEQ ID NO: 28692 - DNA, 42 bp, Emericella nidulans
gaattcactgcggccgccatggcctctggaatcaaaaattca

SEQ ID NO: 28693 - DNA, 53 bp, Emericella nidulans
gttctcgagacgagcgatcgctttaatgtaatataattgtcaagaatcaatcc

SEQ ID NO: 28694 - DNA, 41 bp, Emericella nidulans
gaattcactgcggccgccatgatcaactcgcgatcccgttc

SEQ ID NO: 28695 - DNA, 41 bp, Emericella nidulans
gttctcgagacgagcgatcgcgaccccagtagtgacggaga

SEQ ID NO: 28696 - DNA, 41 bp, Emericella nidulans
gaattcactgcggccgccatggccacaaacactgtgcagaa

SEQ ID NO: 28697 - DNA, 47 bp, Emericella nidulans
gttctcgagacgagcgatcgctttttccatactcgataaaaatcaca

SEQ ID NO: 28698 - DNA, 41 bp, Emericella nidulans
gaattcactgcggccgccatgggcaatctattaggggcaca

SEQ ID NO: 28699 - DNA, 41 bp, Emericella nidulans
gttctcgagacgagcgatcgcacaagcaaccctcaaatgac

SEQ ID NO: 28700 - DNA, 41 bp, Emericella nidulans
gaattcactgcggccgccatgtttcgagctcaactgactgc

SEQ ID NO: 28701 - DNA, 41 bp, Emericella nidulans
gttctcgagacgagcgatcgcgcatcccctacaaagtcgag

SEQ ID NO: 28702 - DNA, 57 bp, Emericella nidulans
gaattcactgcggccgccatgctgtagactacatcagtctcatataagctaaccatc

SEQ ID NO: 28703 - DNA, 41 bp, Emericella nidulans
gttctcgagacgagcgatcgcaaagcggcacatgacataca

SEQ ID NO: 28704 - DNA, 41 bp, Emericella nidulans
gaattcactgcggccgccatggttacgcgaaagggaaacaa

SEQ ID NO: 28705 - DNA, 41 bp, Emericella nidulans
gttctcgagacgagcgatcgcatggcatcaggttcgatctc

SEQ ID NO: 28706 - DNA, 41 bp, Emericella nidulans
gaattcactgcggccgccatggaggatcctcatcgtcctca

SEQ ID NO: 28707 - DNA, 43 bp, Emericella nidulans
gttctcgagacgagcgatcgctccatgaatgcaactaccaatc

SEQ ID NO: 28708 - DNA, 41 bp, Emericella nidulans
gaattcactgcggccgccatggccaaaaccacctccacata

SEQ ID NO: 28709 - DNA, 40 bp, Emericella nidulans
gttctcgagacgagcgatcgccgcacacagctctgttaga

SEQ ID NO: 28710 - DNA, 42 bp, Emericella nidulans
gaattcactgcggccgccatgtcaatttcattaccgggaaca

SEQ ID NO: 28711 - DNA, 41 bp, Emericella nidulans
gttctcgagacgagcgatcgcccactgctgtagcttgacga

SEQ ID NO: 28712 - DNA, 41 bp, Emericella nidulans
gaattcactgcggccgccatggctgacaatgggcactcttt

SEQ ID NO: 28713 - DNA, 41 bp, Emericella nidulans
gttctcgagacgagcgatcgcagacctgcgaaccaatgaac

SEQ ID NO: 28714 - DNA, 41 bp, Emericella nidulans
gaattcactgcggccgccatggactggtgctctgcatttgt

SEQ ID NO: 28715 - DNA, 41 bp, Emericella nidulans
gttctcgagacgagcgatcgcaaccattcaacgcacgttac

SEQ ID NO: 28716 - DNA, 41 bp, Emericella nidulans
gaattcactgcggccgccatgattccttttgagcgcctacc

SEQ ID NO: 28717 - DNA, 44 bp, Emericella nidulans
gttctcgagacgagcgatcgcgaaaagaaccaatattccattcg

SEQ ID NO: 28718 - DNA, 41 bp, Emericella nidulans; identical to SEQ ID NO: 28716

SEQ ID NO: 28719 - DNA, 44 bp, Emericella nidulans; identical to SEQ ID NO: 28717

SEQ ID NO: 28720 - DNA, 41 bp, Emericella nidulans; identical to SEQ ID NO: 28716

SEQ ID NO: 28721 - DNA, 44 bp, Emericella nidulans; identical to SEQ ID NO: 28717

SEQ ID NO: 28722 - DNA, 42 bp, Emericella nidulans
gaattcactgcggccgccatgacgaaactactaccgcttttt

SEQ ID NO: 28723 - DNA, 41 bp, Emericella nidulans
gttctcgagacgagcgatcgccagagagaccatcgcaacaa

SEQ ID NO: 28724 - DNA, 41 bp, Emericella nidulans
gaattcactgcggccgccatgatcaaaaggaggctctgcaa

SEQ ID NO: 28725 - DNA, 46 bp, Emericella nidulans
gttctcgagacgagcgatcgctctggtcgtagcaggtatatttctt

SEQ ID NO: 28726 - DNA, 41 bp, Emericella nidulans
gaattcactgcggccgccatgcgcaacctccaaagtactcc

SEQ ID NO: 28727 - DNA, 41 bp, Emericella nidulans
gttctcgagacgagcgatcgcgatcttgatttgcgtcgtca

SEQ ID NO: 28728 - DNA, 41 bp, Emericella nidulans
gaattcactgcggccgccatgaacaacgccagaccagaaac

SEQ ID NO: 28729 - DNA, 46 bp, Emericella nidulans
gttctcgagacgagcgatcgcgacttgaatgctcttttattttcaa

SEQ ID NO: 28730 - DNA, 40 bp, Emericella nidulans
gaattcactgcggccgccatgaccaggaaatcgaccaagc

SEQ ID NO: 28731 - DNA, 41 bp, Emericella nidulans
gttctcgagacgagcgatcgcctactatgccccctccacct

SEQ ID NO: 28732 - DNA, 41 bp, Emericella nidulans
gaattcactgcggccgccatgcaagggcgagcactaagaag

SEQ ID NO: 28733 - DNA, 47 bp, Emericella nidulans
gttctcgagacgagcgatcgcattatacaaggtcaaatagaggcagt

SEQ ID NO: 28734 - DNA, 41 bp, Emericella nidulans
gaattcactgcggccgccatgcgaggctttgccattatctc

SEQ ID NO: 28735 - DNA, 41 bp, Emericella nidulans
gttctcgagacgagcgatcgcggatcgccgaataacaacat

SEQ ID NO: 28736 - DNA, 41 bp, Emericella nidulans
gaattcactgcggccgccatgagcctccatttcctctctgg

SEQ ID NO: 28737 - DNA, 47 bp, Emericella nidulans
gttctcgagacgagcgatcgcgtatcagaacaggtacatttataacg

SEQ ID NO: 28738 - DNA, 41 bp, Emericella nidulans
gaattcactgcggccgccatgcgactaatgggagtcgtggt

SEQ ID NO: 28739 - DNA, 51 bp, Emericella nidulans
gttctcgagacgagcgatcgcatatgtaaaaattgtttaatgctaaactgc

SEQ ID NO: 28740 - DNA, 41 bp, Emericella nidulans
gaattcactgcggccgccatggccctctgctcttcattcag

SEQ ID NO: 28741 - DNA, 43 bp, Emericella nidulans
gttctcgagacgagcgatcgctgtaactggcctttgatattcg

SEQ ID NO: 28742 - DNA, 41 bp, Emericella nidulans
gaattcactgcggccgccatgtactaccgtgcgccagaaat

SEQ ID NO: 28743 - DNA, 41 bp, Emericella nidulans
gttctcgagacgagcgatcgcacatcgcgcatgacataaat

SEQ ID NO: 28744 - DNA, 40 bp, Emericella nidulans
gaattcactgcggccgccatggaaccaaacggacaagcct

SEQ ID NO: 28745 - DNA, 49 bp, Emericella nidulans
gttctcgagacgagcgatcgccttttggtacgtcttatatatttgtttt

SEQ ID NO: 28746 - DNA, 40 bp, Emericella nidulans
gaattcactgcggccgccatggttcagaccggcaagaagc

SEQ ID NO: 28747 - DNA, 41 bp, Emericella nidulans
gttctcgagacgagcgatcgcgaaccggtaggaacgaaaca

SEQ ID NO: 28748 - DNA, 41 bp, Emericella nidulans
gaattcactgcggccgccatgttgacaaaaatccccaaagc

SEQ ID NO: 28749 - DNA, 43 bp, Emericella nidulans
gttctcgagacgagcgatcgcgatcagtcagacgctcaattac

SEQ ID NO: 28750 - DNA, 41 bp, Emericella nidulans
gaattcactgcggccgccatgaccacctcgagtgctaatgg

SEQ ID NO: 28751 - DNA, 41 bp, Emericella nidulans
gttctcgagacgagcgatcgcgactggaggggtttcattca

SEQ ID NO: 28752 - DNA, 41 bp, Emericella nidulans
gaattcactgcggccgccatgaccccggtaactcctccata

SEQ ID NO: 28753 - DNA, 45 bp, Emericella nidulans
gttctcgagacgagcgatcgcgcatatgcgtagaattctgatttg

SEQ ID NO: 28754 - DNA, 41 bp, Emericella nidulans
gaattcactgcggccgccatgcattctagcaatcgcgtact

SEQ ID NO: 28755 - DNA, 41 bp, Emericella nidulans
gttctcgagacgagcgatcgcctcgaaaggttatgctgcac

SEQ ID NO: 28756 - DNA, 41 bp, Emericella nidulans
gaattcactgcggccgccatgcgtgaactacgccctcaaat

SEQ ID NO: 28757 - DNA, 54 bp, Emericella nidulans
gttctcgagacgagcgatcgcaagctaagaaattttaatttctattggttttca

SEQ ID NO: 28758 - DNA, 43 bp, Emericella nidulans
gaattcactgcggccgccatgtcgacaactctgatcttttcca

SEQ ID NO: 28759 - DNA, 43 bp, Emericella nidulans
gttctcgagacgagcgatcgctgtctgttcaagtgcatagcct

SEQ ID NO: 28760 - DNA, 41 bp, Emericella nidulans
gaattcactgcggccgccatgatccagatccaaccatgcaa

SEQ ID NO: 28761 - DNA, 42 bp, Emericella nidulans
gttctcgagacgagcgatcgcgcagatgtgattgtgattgga

SEQ ID NO: 28762 - DNA, 41 bp, Emericella nidulans
gaattcactgcggccgccatggagcacggacgagtacacaa

SEQ ID NO: 28763 - DNA, 44 bp, Emericella nidulans
gttctcgagacgagcgatcgcttgaatggattttggatagattt

SEQ ID NO: 28764 - DNA, 41 bp, Emericella nidulans
gaattcactgcggccgccatggctcctcttacgtggagtcg

SEQ ID NO: 28765 - DNA, 41 bp, Emericella nidulans
gttctcgagacgagcgatcgcaagggtaaacacgccacttg

SEQ ID NO: 28766 - DNA, 41 bp, Emericella nidulans
gaattcactgcggccgccatgttcccaattgctttgagctt

SEQ ID NO: 28767 - DNA, 41 bp, Emericella nidulans
gttctcgagacgagcgatcgctctggggaataacgctgcta

SEQ ID NO: 28768 - DNA, 41 bp, Emericella nidulans
gaattcactgcggccgccatgatgtccacaattcggttggt

SEQ ID NO: 28769 - DNA, 56 bp, Emericella nidulans
gttctcgagacgagcgatcgcgtacgtcttatatatttgttttaattgtaaattct

SEQ ID NO: 28770 - DNA, 41 bp, Emericella nidulans
gaattcactgcggccgccatgatccccaatctcccaaactc

SEQ ID NO: 28771 - DNA, 54 bp, Emericella nidulans
gttctcgagacgagcgatcgccttaagcttaagagttctttattatttagttca

SEQ ID NO: 28772 - DNA, 42 bp, Emericella nidulans
gaattcactgcggccgccatgcgattcatatgatcgagcaag

SEQ ID NO: 28773 - DNA, 41 bp, Emericella nidulans
gttctcgagacgagcgatcgcgtatgctgacatgcgagtgc

SEQ ID NO: 28774 - DNA, 41 bp, Emericella nidulans
gaattcactgcggccgccatgcaacgaccgtactacgcaaa

SEQ ID NO: 28775 - DNA, 51 bp, Emericella nidulans
gttctcgagacgagcgatcgcgagttctagatatgtgaagtattcaatgag

SEQ ID NO: 28776 - DNA, 41 bp, Emericella nidulans
gaattcactgcggccgccatgcttcattcccacaacatccc

SEQ ID NO: 28777 - DNA, 44 bp, Emericella nidulans
gttctcgagacgagcgatcgccagagcaaaatacacattgatcg

SEQ ID NO: 28778 - DNA, 44 bp, Emericella nidulans
gaattcactgcggccgccatgctcactgtcgagtcactaaaagg

SEQ ID NO: 28779 - DNA, 41 bp, Emericella nidulans; identical to SEQ ID NO: 28773

SEQ ID NO: 28780 - DNA, 41 bp, Emericella nidulans
gaattcactgcggccgccatgcgcctttgcttacgagtacc

SEQ ID NO: 28781 - DNA, 44 bp, Emericella nidulans
gttctcgagacgagcgatcgctgggaagaatagtgggatatctg

SEQ ID NO: 28782 - DNA, 41 bp, Emericella nidulans
gaattcactgcggccgccatggccacgcaacatacttacga

SEQ ID NO: 28783 - DNA, 44 bp, Emericella nidulans
gttctcgagacgagcgatcgcctttaaacacctttgatttctgc

SEQ ID NO: 28784 - DNA, 40 bp, Emericella nidulans
gaattcactgcggccgccatgccgaacgcgactgtagaaa

SEQ ID NO: 28785 - DNA, 42 bp, Emericella nidulans
gttctcgagacgagcgatcgcagagttcggatctttgcattg

SEQ ID NO: 28786 - DNA, 41 bp, Emericella nidulans
gaattcactgcggccgccatgaaggctaaaaccttgccctc

SEQ ID NO: 28787 - DNA, 41 bp, Emericella nidulans
gttctcgagacgagcgatcgctaatctttacgtcccgcctc

SEQ ID NO: 28788 - DNA, 42 bp, Emericella nidulans
gaattcactgcggccgccatgggatgatgttggccttattcc

SEQ ID NO: 28789 - DNA, 41 bp, Emericella nidulans
gttctcgagacgagcgatcgcgaagagtactcgggcagcag

SEQ ID NO: 28790 - DNA, 41 bp, Emericella nidulans
gaattcactgcggccgccatggggaaattctgggaaagagc

SEQ ID NO: 28791 - DNA, 43 bp, Emericella nidulans
gttctcgagacgagcgatcgctgtggtaaaagagacacggaga

SEQ ID NO: 28792 - DNA, 41 bp, Emericella nidulans
gaattcactgcggccgccatgttgcggtaagtggaaagtcc

SEQ ID NO: 28793 - DNA, 51 bp, Emericella nidulans
gttctcgagacgagcgatcgcaatgttaatgaatcattctcaactatatta

SEQ ID NO: 28794 - DNA, 39 bp, Emericella nidulans
gaattcactgcggccgccatggttgccggtctcggtgtc

SEQ ID NO: 28795 - DNA, 48 bp, Emericella nidulans
gttctcgagacgagcgatcgccatcaaatagtaatacacatcacaccc

SEQ ID NO: 28796 - DNA, 41 bp, Emericella nidulans
gaattcactgcggccgccatgccaggaaatgattacccacc

SEQ ID NO: 28797 - DNA, 44 bp, Emericella nidulans
gttctcgagacgagcgatcgcgaagaataaaagccaccattgaa

SEQ ID NO: 28798 - DNA, 41 bp, Emericella nidulans
gaattcactgcggccgccatgccagcgagctgtatcaacaa

SEQ ID NO: 28799 - DNA, 42 bp, Emericella nidulans
gttctcgagacgagcgatcgctcgagtctgtagcattgagtg

SEQ ID NO: 28800 - DNA, 43 bp, Emericella nidulans
gaattcactgcggccgccatgggcagatatctccacatcatcc

SEQ ID NO: 28801 - DNA, 43 bp, Emericella nidulans
gttctcgagacgagcgatcgctgccatgagataaggtgtatgc

SEQ ID NO: 28802 - DNA, 41 bp, Emericella nidulans
gaattcactgcggccgccatgagtggctgttgaaatgggac

SEQ ID NO: 28803 - DNA, 50 bp, Emericella nidulans
gttctcgagacgagcgatcgccctttatgaataagataatatgatgaaca

SEQ ID NO: 28804 - DNA, 41 bp, Emericella nidulans
gaattcactgcggccgccatgcaaaattcgcagggaggtag

SEQ ID NO: 28805 - DNA, 55 bp, Emericella nidulans
gttctcgagacgagcgatcgctgtgccatctgtagtgtatatactctctatcaac

SEQ ID NO: 28806 - DNA, 42 bp, Emericella nidulans
gaattcactgcggccgccatgcgactgtcatcacagctgact

SEQ ID NO: 28807 - DNA, 53 bp, Emericella nidulans
gttctcgagacgagcgatcgcacataagaatacgtatctcattctacttatcg

SEQ ID NO: 28808 - DNA, 41 bp, Emericella nidulans
gaattcactgcggccgccatgagtaacctgcgagccaaaaa

SEQ ID NO: 28809 - DNA, 46 bp, Emericella nidulans
gttctcgagacgagcgatcgctttgcatgtttgtctatgatagctc

SEQ ID NO: 28810 - DNA, 41 bp, Emericella nidulans
gaattcactgcggccgccatggctcccaatcatcattcctt

SEQ ID NO: 28811 - DNA, 41 bp, Emericella nidulans
gttctcgagacgagcgatcgcaagattccaggtgccaaatg

SEQ ID NO: 28812 - DNA, 41 bp, Emericella nidulans
gaattcactgcggccgccatgcttggtccaccacttgatcc

SEQ ID NO: 28813 - DNA, 45 bp, Emericella nidulans
gttctcgagacgagcgatcgcgacaagaacgtatgactcatgaaa

SEQ ID NO: 28814 - DNA, 41 bp, Emericella nidulans
gaattcactgcggccgccatgccatcatcatctcccctcac

SEQ ID NO: 28815 - DNA, 41 bp, Emericella nidulans
gttctcgagacgagcgatcgccggtcatgatcatgcttgta

SEQ ID NO: 28816 - DNA, 41 bp, Emericella nidulans
gaattcactgcggccgccatgtcaccccagacaatcaaaca

SEQ ID NO: 28817 - DNA, 50 bp, Emericella nidulans
gttctcgagacgagcgatcgcaaagggtcttatattgatattcatctacc

SEQ ID NO: 28818 - DNA, 41 bp, Emericella nidulans; identical to SEQ ID NO: 28810

SEQ ID NO: 28819 - DNA, 41 bp, Emericella nidulans
gttctcgagacgagcgatcgcgcttgatgttgcatttgctg

SEQ ID NO: 28820 - DNA, 41 bp, Emericella nidulans
gaattcactgcggccgccatgtctggaccacccaaatcttc

SEQ ID NO: 28821 - DNA, 43 bp, Emericella nidulans
gttctcgagacgagcgatcgcgtcaatgattgactgataacga

SEQ ID NO: 28822 - DNA, 41 bp, Emericella nidulans
gaattcactgcggccgccatgaccagcagggcaggtatatg

SEQ ID NO: 28823 - DNA, 42 bp, Emericella nidulans
gttctcgagacgagcgatcgcaactgagtgcgtcctaagtgc

SEQ ID NO: 28824 - DNA, 41 bp, Emericella nidulans
gaattcactgcggccgccatgtggcgcaatactgatttcac

SEQ ID NO: 28825 - DNA, 45 bp, Emericella nidulans
gttctcgagacgagcgatcgcccagggtaaatattaaggataggg

SEQ ID NO: 28826 - DNA, 45 bp, Emericella nidulans
gaattcactgcggccgccatgagactttgtgtcccgtgttttgga

SEQ ID NO: 28827 - DNA, 52 bp, Emericella nidulans
gttctcgagacgagcgatcgcaggcttaggcttaggcttagttcgaatctct

SEQ ID NO: 28828 - DNA, 45 bp, Emericella nidulans
gaattcactgcggccgccatggctaggtcagctcgccctaccaca

SEQ ID NO: 28829 - DNA, 44 bp, Emericella nidulans
gttctcgagacgagcgatcgctgagagcgttcattccctgatgg

SEQ ID NO: 28830 - DNA, 41 bp, Emericella nidulans
gaattcactgcggccgccatggccacacgattcggtcatcg

SEQ ID NO: 28831 - DNA, 49 bp, Emericella nidulans
gttctcgagacgagcgatcgcttattcttcttctttctgcagtcaccca

SEQ ID NO: 28832 - DNA, 48 bp, Emericella nidulans
gaattcactgcggccgccatggagtgagggtgaatagttgcaagacga

SEQ ID NO: 28833 - DNA, 41 bp, Emericella nidulans
gttctcgagacgagcgatcgctccgcgccgctgcaattcta

SEQ ID NO: 28834 - DNA, 53 bp, Emericella nidulans
gaattcactgcggccgccatgcctgttttcactctaatgctctctcttcccac

SEQ ID NO: 28835 - DNA, 57 bp, Emericella nidulans
gttctcgagacgagcgatcgcattcacatatatcgtaatctcatagtcgtcaataca

SEQ ID NO: 28836 - DNA, 43 bp, Emericella nidulans
gaattcactgcggccgccatgcgggggttctactgctgcgtga

SEQ ID NO: 28837 - DNA, 57 bp, Emericella nidulans
gttctcgagacgagcgatcgcatctagattataagaatacttcgattgagaagccac

SEQ ID NO: 28838 - DNA, 42 bp, Emericella nidulans
gaattcactgcggccgccatgtgacgcaacacgaccagcaca

SEQ ID NO: 28839 - DNA, 41 bp, Emericella nidulans
gttctcgagacgagcgatcgcggccatcgtcgatgcggagt

SEQ ID NO: 28840 - DNA, 45 bp, Emericella nidulans
gaattcactgcggccgccatgtgagcgcggcatttactctctcaa

SEQ ID NO: 28841 - DNA, 49 bp, Emericella nidulans
gttctcgagacgagcgatcgctcagatattttcgaattttccggactgc

SEQ ID NO: 28842 - DNA, 41 bp, Emericella nidulans
gaattcactgcggccgccatgttcgttctggctgccgttgg

SEQ ID NO: 28843 - DNA, 46 bp, Emericella nidulans
gttctcgagacgagcgatcgctggcgaatattgtggcttcatgacc

SEQ ID NO: 28844 - DNA, 41 bp, Emericella nidulans
gaattcactgcggccgccatgcggcttgcgcccatttcact

SEQ ID NO: 28845 - DNA, 57 bp, Emericella nidulans
gttctcgagacgagcgatcgctttttcatgttatactaggtcattggtatcaagtct

SEQ ID NO: 28846 - DNA, 50 bp, Emericella nidulans
gaattcactgcggccgccatggagcagaaatatggtggcaagtactacga

SEQ ID NO: 28847 - DNA, 57 bp, Emericella nidulans
gttctcgagacgagcgatcgcataagaggtcatatcacatcacttcaagattttcag

SEQ ID NO: 28848 - DNA, 41 bp, Emericella nidulans
gaattcactgcggccgccatgcagcctcaggcccagcaggt

SEQ ID NO: 28849 - DNA, 57 bp, Emericella nidulans
gttctcgagacgagcgatcgctatatctcgaatcaagagtgcttactgggccccttc

SEQ ID NO: 28850 - DNA, 41 bp, Emericella nidulans
gaattcactgcggccgccatgccgcggtcgtcgtctgtagg

SEQ ID NO: 28851 - DNA, 57 bp, Emericella nidulans; identical to SEQ ID NO: 28315

SEQ ID NO: 28852 - DNA, 44 bp, Emericella nidulans
gaattcactgcggccgccatggctccagaagatgttccccgaca

SEQ ID NO: 28853 - DNA, 41 bp, Emericella nidulans
gttctcgagacgagcgatcgcgcgccatgcaggaacccaaa

SEQ ID NO: 28854 - DNA, 42 bp, Emericella nidulans
gaattcactgcggccgccatgtgccaccaggtgcaatgatga

SEQ ID NO: 28855 - DNA, 41 bp, Emericella nidulans
gttctcgagacgagcgatcgcggcagcaaagacgccccagt

SEQ ID NO: 28856 - DNA, 42 bp, Emericella nidulans; identical to SEQ ID NO: 28854

SEQ ID NO: 28857 - DNA, 41 bp, Emericella nidulans; identical to SEQ ID NO: 28855

SEQ ID NO: 28858 - DNA, 42 bp, Emericella nidulans
gaattcactgcggccgccatgcgaggcctggatgaggatgga

SEQ ID NO: 28859 - DNA, 41 bp, Emericella nidulans
gttctcgagacgagcgatcgcgccgcgccagtggagaggat

SEQ ID NO: 28860 - DNA, 44 bp, Emericella nidulans
gaattcactgcggccgccatgggcttcggtcatggtggcttatg

SEQ ID NO: 28861 - DNA, 57 bp, Emericella nidulans
gttctcgagacgagcgatcgctagagtgttgttattcctatagagtattggacgcta

SEQ ID NO: 28862 - DNA, 41 bp, Emericella nidulans
gaattcactgcggccgccatgtacgcgtctgagcgcgagcc

SEQ ID NO: 28863 - DNA, 49 bp, Emericella nidulans
gttctcgagacgagcgatcgccatcagtatcgtcagttcttcacctcag

SEQ ID NO: 28864 - DNA, 41 bp, Emericella nidulans; identical to SEQ ID NO: 28862

SEQ ID NO: 28865 - DNA, 49 bp, Emericella nidulans; identical to SEQ ID NO: 28863

SEQ ID NO: 28866 - DNA, 42 bp, Emericella nidulans
gaattcactgcggccgccatggctgaggttgcggctgttcca

SEQ ID NO: 28867 - DNA, 43 bp, Emericella nidulans
gttctcgagacgagcgatcgcgggctgcagattttcgacctca

SEQ ID NO: 28868 - DNA, 41 bp, Emericella nidulans
gaattcactgcggccgccatggaaacccgtgtcacgcccac

SEQ ID NO: 28869 - DNA, 51 bp, Emericella nidulans
gttctcgagacgagcgatcgcttttgtctaaccttgtcattttcccgagca

SEQ ID NO: 28870 - DNA, 41 bp, Emericella nidulans
gaattcactgcggccgccatgggacgccggaaaaacggagc

SEQ ID NO: 28871 - DNA, 44 bp, Emericella nidulans
gttctcgagacgagcgatcgcccggccattgttgttagtgacca

SEQ ID NO: 28872 - DNA, 41 bp, Emericella nidulans
gaattcactgcggccgccatgttcgaccgggctgcgtgttt

SEQ ID NO: 28873 - DNA, 43 bp, Emericella nidulans
gttctcgagacgagcgatcgcgccactccgttttgagcactcg

SEQ ID NO: 28874 - DNA, 41 bp, Emericella nidulans
gaattcactgcggccgccatgtcgcgtgtccaacgctctga

SEQ ID NO: 28875 - DNA, 51 bp, Emericella nidulans
gttctcgagacgagcgatcgccaacttgtattcgcaatttcatcaaatcat

SEQ ID NO: 28876 - DNA, 57 bp, Emericella nidulans
gaattcactgcggccgccatgcaagaaacagtctatgtgtttcattcagtagataaa

SEQ ID NO: 28877 - DNA, 42 bp, Emericella nidulans
gttctcgagacgagcgatcgctccacctggtcctccgtctcc

SEQ ID NO: 28878 - DNA, 47 bp, Emericella nidulans
gaattcactgcggccgccatggcctggaccgaatttggtcaattatg

SEQ ID NO: 28879 - DNA, 52 bp, Emericella nidulans
gttctcgagacgagcgatcgcagaaaaggcttaaaactgcatttaagggtgc

SEQ ID NO: 28880 - DNA, 43 bp, Emericella nidulans
gaattcactgcggccgccatgcgaaccgagctgaaaaggaaca

SEQ ID NO: 28881 - DNA, 42 bp, Emericella nidulans
gttctcgagacgagcgatcgcgggctgagtgcagcataccca

SEQ ID NO: 28882 - DNA, 54 bp, Emericella nidulans
gaattcactgcggccgccatgcgggatattcatctctaactgggaaatagatcg

SEQ ID NO: 28883 - DNA, 46 bp, Emericella nidulans
gttctcgagacgagcgatcgctacagatgctggggctttgaatttt

SEQ ID NO: 28884 - DNA, 41 bp, Emericella nidulans
gaattcactgcggccgccatgcgccatcagctaccccgaca

SEQ ID NO: 28885 - DNA, 53 bp, Emericella nidulans
gttctcgagacgagcgatcgcaacagaagccttaagaggtattgcaatatgaa

SEQ ID NO: 28886 - DNA, 49 bp, Emericella nidulans
gaattcactgcggccgccatggtctgttaacctgtaaatgccgctatga

SEQ ID NO: 28887 - DNA, 50 bp, Emericella nidulans
gttctcgagacgagcgatcgcatttcagaaacttttcattaggccactgt

SEQ ID NO: 28888 - DNA, 48 bp, Emericella nidulans
gaattcactgcggccgccatgtccgaagccatgaatagcataagcaca

SEQ ID NO: 28889 - DNA, 49 bp, Emericella nidulans
gttctcgagacgagcgatcgcttcgggttaataatacacatgcacaacg

SEQ ID NO: 28890 - DNA, 42 bp, Emericella nidulans
gaattcactgcggccgccatgtgtgcatgggtggaagcatgg

SEQ ID NO: 28891 - DNA, 53 bp, Emericella nidulans
gttctcgagacgagcgatcgctaagtctcagctattttcagtcgcccgcgaag

SEQ ID NO: 28892 - DNA, 42 bp, Emericella nidulans
gaattcactgcggccgccatgaccgtcaggagcacgccaatc

SEQ ID NO: 28893 - DNA, 56 bp, Emericella nidulans
gttctcgagacgagcgatcgccaaggtattccagtaagtaggcaaataaatagacg

SEQ ID NO: 28894 - DNA, 51 bp, Emericella nidulans
gaattcactgcggccgccatgcatcaagactgtctctaagccctgttttgg

SEQ ID NO: 28895 - DNA, 52 bp, Emericella nidulans
gttctcgagacgagcgatcgccttataaaccacagcccatctgttaagacac

SEQ ID NO: 28896 - DNA, 41 bp, Emericella nidulans
gaattcactgcggccgccatggatgagcgtgcccgtgaggc

SEQ ID NO: 28897 - DNA, 48 bp, Emericella nidulans
gttctcgagacgagcgatcgctcattcgttcaacatccattgcttgtg

SEQ ID NO: 28898 - DNA, 41 bp, Emericella nidulans
gaattcactgcggccgccatgatccatcggctggtcgggtg

SEQ ID NO: 28899 - DNA, 51 bp, Emericella nidulans
gttctcgagacgagcgatcgcgcgagaaagactgattggatataagacggt

SEQ ID NO: 28900 - DNA, 43 bp, Emericella nidulans
gaattcactgcggccgccatgtgcgtcaacgacttcaccacca

SEQ ID NO: 28901 - DNA, 52 bp, Emericella nidulans
gttctcgagacgagcgatcgcacataggcgagagtatcattgagaagctagt

SEQ ID NO: 28902 - DNA, 45 bp, Emericella nidulans
gaattcactgcggccgccatgcgtctctgatattcccgccgttcc

SEQ ID NO: 28903 - DNA, 53 bp, Emericella nidulans
gttctcgagacgagcgatcgctctttcaagtttctttactcgatccaaattga

SEQ ID NO: 28904 - DNA, 41 bp, Emericella nidulans
gaattcactgcggccgccatgtgccgggtcagccctttttg

SEQ ID NO: 28905 - DNA, 49 bp, Emericella nidulans
gttctcgagacgagcgatcgccttcaagaagaggattttgatttcgtca

SEQ ID NO: 28906 - DNA, 48 bp, Emericella nidulans
gaattcactgcggccgccatgtgactgtctggtataggacgcggaaga

SEQ ID NO: 28907 - DNA, 46 bp, Emericella nidulans
gttctcgagacgagcgatcgctcgaaatgtggcatgtattgacaaa

SEQ ID NO: 28908 - DNA, 41 bp, Emericella nidulans
gaattcactgcggccgccatgtgcggcgccaaattcattca

SEQ ID NO: 28909 - DNA, 41 bp, Emericella nidulans
gttctcgagacgagcgatcgcataccggcgcaacggctcct

SEQ ID NO: 28910 - DNA, 41 bp, Emericella nidulans
gaattcactgcggccgccatggccggtgcctggaccatgag

SEQ ID NO: 28911 - DNA, 45 bp, Emericella nidulans
gttctcgagacgagcgatcgcgggcataggcagagaatgcagcag

SEQ ID NO: 28912 - DNA, 44 bp, Emericella nidulans
gaattcactgcggccgccatgtctggttctgactccggttctgg

SEQ ID NO: 28913 - DNA, 41 bp, Emericella nidulans
gttctcgagacgagcgatcgccgcacgcgtcaggcaacttc

SEQ ID NO: 28914 - DNA, 44 bp, Emericella nidulans
gaattcactgcggccgccatgtcgtttgagcactccgacggaaa

SEQ ID NO: 28915 - DNA, 53 bp, Emericella nidulans
gttctcgagacgagcgatcgctgtccttgaatgggtcatatcaatctatccac

SEQ ID NO: 28916 - DNA, 57 bp, Emericella nidulans
gaattcactgcggccgccatgagaaggtatagctgaggtatatttacgaaaaatcaa

SEQ ID NO: 28917 - DNA, 42 bp, Emericella nidulans; identical to SEQ ID NO: 28877

SEQ ID NO: 28918 - DNA, 52 bp, Emericella nidulans
gaattcactgcggccgccatgactattttaacttccaagggtctcgccttgt

SEQ ID NO: 28919 - DNA, 41 bp, Emericella nidulans
gttctcgagacgagcgatcgcccacctgcctcacggcagaa

SEQ ID NO: 28920 - DNA, 41 bp, Emericella nidulans
gaattcactgcggccgccatggccgtgtgccgaaagggaag

SEQ ID NO: 28921 - DNA, 46 bp, Emericella nidulans
gttctcgagacgagcgatcgccggttatgagtacgacctggcgtga

SEQ ID NO: 28922 - DNA, 55 bp, Emericella nidulans
gaattcactgcggccgccatgctttttagcgaggtaactagttcttctccgttcc

SEQ ID NO: 28923 - DNA, 42 bp, Emericella nidulans
gttctcgagacgagcgatcgccggtccagagcccactgttcg

SEQ ID NO: 28924 - DNA, 41 bp, Emericella nidulans
gaattcactgcggccgccatgaaccactttgcggcggttgc

SEQ ID NO: 28925 - DNA, 44 bp, Emericella nidulans
gttctcgagacgagcgatcgctcatataccccgtcggcacataa

SEQ ID NO: 28926 - DNA, 44 bp, Emericella nidulans
gaattcactgcggccgccatgcccccttctatgggggaccttgt

SEQ ID NO: 28927 - DNA, 49 bp, Emericella nidulans
gttctcgagacgagcgatcgccagttgacatcctagatgcatggaccac

SEQ ID NO: 28928 - DNA, 40 bp, Emericella nidulans
gaattcactgcggccgccatgaggcctcggcccgatcgtt

SEQ ID NO: 28929 - DNA, 51 bp, Emericella nidulans
gttctcgagacgagcgatcgccaacaaatcatgcagggtatatatcaacaa

SEQ ID NO: 28930 - DNA, 49 bp, Emericella nidulans
gaattcactgcggccgccatggactagcaaaggaaatggctgcccttca

SEQ ID NO: 28931 - DNA, 41 bp, Emericella nidulans
gttctcgagacgagcgatcgcccgctttcctcgccacatca

SEQ ID NO: 28932 - DNA, 56 bp, Emericella nidulans
gaattcactgcggccgccatgcgtggataaatgttggttgatttgatatatcttgc

SEQ ID NO: 28933 - DNA, 48 bp, Emericella nidulans
gttctcgagacgagcgatcgctgcttccgaatggtgtgaatataacga

SEQ ID NO: 28934 - DNA, 48 bp, Emericella nidulans
gaattcactgcggccgccatggcgatgaaatcgcttacattgcatgat

SEQ ID NO: 28935 - DNA, 55 bp, Emericella nidulans
gttctcgagacgagcgatcgctcaaacacactgcagcatatcttatctatatcac

SEQ ID NO: 28936 - DNA, 54 bp, Emericella nidulans
gaattcactgcggccgccatgccctccttctggagtaggtccataagtgtaccg

SEQ ID NO: 28937 - DNA, 48 bp, Emericella nidulans
gttctcgagacgagcgatcgcggtatcagcgtcacgaactttgtctac

SEQ ID NO: 28938 - DNA, 43 bp, Emericella nidulans
gaattcactgcggccgccatgcaatgcgaggaactcccccaaa

SEQ ID NO: 28939 - DNA, 47 bp, Emericella nidulans
gttctcgagacgagcgatcgcaaaaacgaactctcagaaagcctccc

SEQ ID NO: 28940 - DNA, 45 bp, Emericella nidulans
gaattcactgcggccgccatggcgacgatggctcactctgtatca

SEQ ID NO: 28941 - DNA, 41 bp, Emericella nidulans
gttctcgagacgagcgatcgctggatgcggcgtcgagaaca

SEQ ID NO: 28942 - DNA, 43 bp, Emericella nidulans
gaattcactgcggccgccatgcaccggtttctcctggctgtcg

SEQ ID NO: 28943 - DNA, 49 bp, Emericella nidulans
gttctcgagacgagcgatcgctcctccggggatcatgattattagtaga

SEQ ID NO: 28944 - DNA, 41 bp, Emericella nidulans
gaattcactgcggccgccatgcgactgctgggacgctgacg

SEQ ID NO: 28945 - DNA, 47 bp, Emericella nidulans
gttctcgagacgagcgatcgcagaaaggatggcagccttgcaatgta

SEQ ID NO: 28946 - DNA, 54 bp, Emericella nidulans
gaattcactgcggccgccatgctacccatacctctcttactccaggactagcaa

SEQ ID NO: 28947 - DNA, 41 bp, Emericella nidulans; identical to SEQ ID NO: 28931

SEQ ID NO: 28948 - DNA, 40 bp, Emericella nidulans
gaattcactgcggccgccatggtgataggcggcggcagca

SEQ ID NO: 28949 - DNA, 41 bp, Emericella nidulans
gttctcgagacgagcgatcgcccggcgaaccgctctaacaa

SEQ ID NO: 28950 - DNA, 41 bp, Emericella nidulans
gaattcactgcggccgccatgggaattgcagtgcgccacga

SEQ ID NO: 28951 - DNA, 57 bp, Emericella nidulans
gttctcgagacgagcgatcgctaatcagatatgtgatatgtagtttaagccgccacc

SEQ ID NO: 28952 - DNA, 42 bp, Emericella nidulans
gaattcactgcggccgccatgtgctggggaatgaaggcgaat

SEQ ID NO: 28953 - DNA, 52 bp, Emericella nidulans
gttctcgagacgagcgatcgctggaaaggtccatggaattgtatgagaacga

SEQ ID NO: 28954 - DNA, 41 bp, Emericella nidulans; identical to SEQ ID NO: 28950

SEQ ID NO: 28955 - DNA, 57 bp, Emericella nidulans
gttctcgagacgagcgatcgcataatcagatatgtgatatgtagtttaagccgccac

SEQ ID NO: 28956 - DNA, 42 bp, Emericella nidulans; identical to SEQ ID NO: 28952

SEQ ID NO: 28957 - DNA, 52 bp, Emericella nidulans; identical to SEQ ID NO: 28953

SEQ ID NO: 28958 - DNA, 41 bp, Emericella nidulans
gaattcactgcggccgccatgagttggacgcgggcgaggac

SEQ ID NO: 28959 - DNA, 48 bp, Emericella nidulans
gttctcgagacgagcgatcgctgggtgtgatgtattttgcattgagca

SEQ ID NO: 28960 - DNA, 44 bp, Emericella nidulans
gaattcactgcggccgccatgtcgcgtgcttgcttacgatcttc

SEQ ID NO: 28961 - DNA, 42 bp, Emericella nidulans; identical to SEQ ID NO: 28877

SEQ ID NO: 28962 - DNA, 41 bp, Emericella nidulans
gaattcactgcggccgccatgaggaacgaggcgggagagca

SEQ ID NO: 28963 - DNA, 43 bp, Emericella nidulans
gttctcgagacgagcgatcgccctccccgcatcctaaattcca

SEQ ID NO: 28964 - DNA, 55 bp, Emericella nidulans
gaattcactgcggccgccatgttcttacaaaaataaccgtcaactcttgcccata

SEQ ID NO: 28965 - DNA, 47 bp, Emericella nidulans
gttctcgagacgagcgatcgcgataccaaaggccactctgccaggta

SEQ ID NO: 28966 - DNA, 41 bp, Emericella nidulans
gaattcactgcggccgccatggccacggcctccaggacttc

SEQ ID NO: 28967 - DNA, 52 bp, Emericella nidulans
gttctcgagacgagcgatcgctatcagaaatagtgaaatacacttgcggaaa

SEQ ID NO: 28968 - DNA, 56 bp, Emericella nidulans
gaattcactgcggccgccatgtagtgtgttatatttgatccaatctctcgtcttgg

SEQ ID NO: 28969 - DNA, 57 bp, Emericella nidulans
gttctcgagacgagcgatcgcacaatttgaatatatttgtatccgtttatgtaatgg

SEQ ID NO: 28970 - DNA, 45 bp, Emericella nidulans
gaattcactgcggccgccatgcgtggccagtgtcagttatgggag

SEQ ID NO: 28971 - DNA, 50 bp, Emericella nidulans
gttctcgagacgagcgatcgctacagcatgaacttaaggccattgagagg

SEQ ID NO: 28972 - DNA, 42 bp, Emericella nidulans
gaattcactgcggccgccatgacttcgagcgcttcaaggtcc

SEQ ID NO: 28973 - DNA, 56 bp, Emericella nidulans
gttctcgagacgagcgatcgcttcttaagtcatttttatgctgtcaatgataatgc

SEQ ID NO: 28974 - DNA, 52 bp, Emericella nidulans
gaattcactgcggccgccatggagaccaagcctcttgtctacattcaactcc

SEQ ID NO: 28975 - DNA, 43 bp, Emericella nidulans
gttctcgagacgagcgatcgctcacgcaaatcccttgatcagc

SEQ ID NO: 28976 - DNA, 40 bp, Emericella nidulans
gaattcactgcggccgccatggccctcgaggcctgccaca

SEQ ID NO: 28977 - DNA, 42 bp, Emericella nidulans
gttctcgagacgagcgatcgcggatgcagtcacccgccttca

SEQ ID NO: 28978 - DNA, 42 bp, Emericella nidulans
gaattcactgcggccgccatgccaatgctgccggtgttgagc

SEQ ID NO: 28979 - DNA, 48 bp, Emericella nidulans
gttctcgagacgagcgatcgcgccgatgagtatttgatctcgaattgc

SEQ ID NO: 28980 - DNA, 56 bp, Emericella nidulans
gaattcactgcggccgccatgtataggagaagtaacggttgttgaaagcgggcagt

SEQ ID NO: 28981 - DNA, 50 bp, Emericella nidulans
gttctcgagacgagcgatcgcaaagtcagagtgttttctctaccacaacg

SEQ ID NO: 28982 - DNA, 42 bp, Emericella nidulans
gaattcactgcggccgccatgtccaccgcttgacgaaatccc

SEQ ID NO: 28983 - DNA, 44 bp, Emericella nidulans
gttctcgagacgagcgatcgcccgagaccggtaacttcggcttc

SEQ ID NO: 28984 - DNA, 41 bp, Emericella nidulans
gaattcactgcggccgccatgtgcgctcgaagccaaagtcg

SEQ ID NO: 28985 - DNA, 44 bp, Emericella nidulans
gttctcgagacgagcgatcgctgtccattcatcatccgctcgtg

SEQ ID NO: 28986 - DNA, 41 bp, Emericella nidulans
gaattcactgcggccgccatgcggacggccattcgaccagt

SEQ ID NO: 28987 - DNA, 54 bp, Emericella nidulans
gttctcgagacgagcgatcgctggttccttacatatttgattaccgtattctct

SEQ ID NO: 28988 - DNA, 43 bp, Emericella nidulans
gaattcactgcggccgccatgtcgtcacatggcatccgatcct

SEQ ID NO: 28989 - DNA, 49 bp, Emericella nidulans
gttctcgagacgagcgatcgcccttgttttgggtctatcccttgattcc

SEQ ID NO: 28990 - DNA, 43 bp, Emericella nidulans; identical to SEQ ID NO: 28988

SEQ ID NO: 28991 - DNA, 49 bp, Emericella nidulans; identical to SEQ ID NO: 28989

SEQ ID NO: 28992 - DNA, 43 bp, Emericella nidulans; identical to SEQ ID NO: 28988

SEQ ID NO: 28993 - DNA, 49 bp, Emericella nidulans; identical to SEQ ID NO: 28989

SEQ ID NO: 28994 - DNA, 41 bp, Emericella nidulans
gaattcactgcggccgccatgtcccacagcgcccgtctttt

SEQ ID NO: 28995 - DNA, 53 bp, Emericella nidulans
gttctcgagacgagcgatcgcttagctaacgtcgaatcgacgcagcttaatag

SEQ ID NO: 28996 - DNA, 42 bp, Emericella nidulans
gaattcactgcggccgccatgtcccaacctggccctctctca

SEQ ID NO: 28997 - DNA, 41 bp, Emericella nidulans
gttctcgagacgagcgatcgcgcgcagggagcacccagaaa

SEQ ID NO: 28998 - DNA, 41 bp, Emericella nidulans
gaattcactgcggccgccatgtccttcagcgcggctactgc

SEQ ID NO: 28999 - DNA, 41 bp, Emericella nidulans
gttctcgagacgagcgatcgctccacggcatcggcaacgta

SEQ ID NO: 29000 - DNA, 56 bp, Emericella nidulans
gaattcactgcggccgccatgcctgtagtactccgcatccgcagtacagaaattca

SEQ ID NO: 29001 - DNA, 53 bp, Emericella nidulans
gttctcgagacgagcgatcgctatctcttaacgatgatgctaatgtgctcgtg

SEQ ID NO: 29002 - DNA, 55 bp, Emericella nidulans
gaattcactgcggccgccatgacagttccttttcatcaaggttacaagaaaggct

SEQ ID NO: 29003 - DNA, 54 bp, Emericella nidulans
gttctcgagacgagcgatcgcgctagaattgtcatgcgaattgacgttaatggt

SEQ ID NO: 29004 - DNA, 44 bp, Emericella nidulans
gaattcactgcggccgccatgttggcgcttttggtggattacgc

SEQ ID NO: 29005 - DNA, 56 bp, Emericella nidulans
gttctcgagacgagcgatcgcgaatgtcttcttctaaagtatttattcgctgattc

SEQ ID NO: 29006 - DNA, 41 bp, Emericella nidulans
gaattcactgcggccgccatgccgcaccggtctgtctctgc

SEQ ID NO: 29007 - DNA, 54 bp, Emericella nidulans
gttctcgagacgagcgatcgcgacgtaagaaactcattctactgatggaaagaa

SEQ ID NO: 29008 - DNA, 41 bp, Emericella nidulans
gaattcactgcggccgccatgcctgggattgcggggaatgg

SEQ ID NO: 29009 - DNA, 41 bp, Emericella nidulans
gttctcgagacgagcgatcgccgccaccacctctgcacgtc

SEQ ID NO: 29010 - DNA, 41 bp, Emericella nidulans
gaattcactgcggccgccatgagcaaacccgggccttcctg

SEQ ID NO: 29011 - DNA, 56 bp, Emericella nidulans
gttctcgagacgagcgatcgccactagaacgtataatatagcctgtcccaatatgc

SEQ ID NO: 29012 - DNA, 53 bp, Emericella nidulans
gaattcactgcggccgccatgacttctaagattctgtcgatcagttcgtctca

SEQ ID NO: 29013 - DNA, 41 bp, Emericella nidulans
gttctcgagacgagcgatcgcatgcaggacctgcgttgtgc

SEQ ID NO: 29014 - DNA, 42 bp, Emericella nidulans
gaattcactgcggccgccatgcgacgtgccgctatccaatgc

SEQ ID NO: 29015 - DNA, 50 bp, Emericella nidulans
gttctcgagacgagcgatcgccaagtcaagtcgtggagttcatatctctc

SEQ ID NO: 29016 - DNA, 47 bp, Emericella nidulans
gaattcactgcggccgccatgtccatgcgaacttcttagtgtgctcc

SEQ ID NO: 29017 - DNA, 54 bp, Emericella nidulans
gttctcgagacgagcgatcgcataacctcctgaaaatatcctgtgtatgatagg

SEQ ID NO: 29018 - DNA, 41 bp, Emericella nidulans
gaattcactgcggccgccatggccgctgcccagctgtcttc

SEQ ID NO: 29019 - DNA, 49 bp, Emericella nidulans
gttctcgagacgagcgatcgctagcagactcagtcgccgtagaagtgga

SEQ ID NO: 29020 - DNA, 41 bp, Emericella nidulans
gaattcactgcggccgccatgccaccagcagcacccgactg

SEQ ID NO: 29021 - DNA, 49 bp, Emericella nidulans
gttctcgagacgagcgatcgccacagagcttggcaagtatcaatttgtc

SEQ ID NO: 29022 - DNA, 49 bp, Emericella nidulans
gaattcactgcggccgccatgatactgagaaaatgagcctactccgtca

SEQ ID NO: 29023 - DNA, 46 bp, Emericella nidulans
gttctcgagacgagcgatcgccacaaaaggctcaagggtaagtgcc

SEQ ID NO: 29024 - DNA, 41 bp, Emericella nidulans
gaattcactgcggccgccatgccgaagccgtcgggaaatcg

SEQ ID NO: 29025 - DNA, 51 bp, Emericella nidulans
gttctcgagacgagcgatcgctcatgtactgatctgctgttttgtgactcg

SEQ ID NO: 29026 - DNA, 42 bp, Emericella nidulans
gaattcactgcggccgccatgcgttgaggacggtggcagctc

SEQ ID NO: 29027 - DNA, 50 bp, Emericella nidulans
gttctcgagacgagcgatcgcggtcgaagagaaatgtacatgtcggagtg

SEQ ID NO: 29028 - DNA, 51 bp, Emericella nidulans
gaattcactgcggccgccatgatatcagatcagaccggatctcaaactccc

SEQ ID NO: 29029 - DNA, 49 bp, Emericella nidulans
gttctcgagacgagcgatcgcagccaaagaacagttgctggaataatga

SEQ ID NO: 29030 - DNA, 49 bp, Emericella nidulans
gaattcactgcggccgccatgtaagacagagtgctcccatatcagtgcc

SEQ ID NO: 29031 - DNA, 44 bp, Emericella nidulans
gttctcgagacgagcgatcgcccgtcagcctcaaaaatggctca

SEQ ID NO: 29032 - DNA, 45 bp, Emericella nidulans
gaattcactgcggccgccatgaacagcggttgctacagtcgacac

SEQ ID NO: 29033 - DNA, 48 bp, Emericella nidulans
gttctcgagacgagcgatcgcgtctccagagatcacaggtcaaagctc

SEQ ID NO: 29034 - DNA, 45 bp, Emericella nidulans; identical to SEQ ID NO: 29032

SEQ ID NO: 29035 - DNA, 48 bp, Emericella nidulans; identical to SEQ ID NO: 29033

SEQ ID NO: 29036 - DNA, 51 bp, Emericella nidulans
gaattcactgcggccgccatgctaatcaggagtatttgagtgggctaacaa

SEQ ID NO: 29037 - DNA, 44 bp, Emericella nidulans
gttctcgagacgagcgatcgccgacttggccaataccttcagga

SEQ ID NO: 29038 - DNA, 41 bp, Emericella nidulans
gaattcactgcggccgccatgctccgccgacgagcatctca

SEQ ID NO: 29039 - DNA, 57 bp, Emericella nidulans
gttctcgagacgagcgatcgcaaaaagactagcgtatatagaataggtcaggcaagg

SEQ ID NO: 29040 - DNA, 41 bp, Emericella nidulans
gaattcactgcggccgccatgccccagccagcaagccaatg

SEQ ID NO: 29041 - DNA, 57 bp, Emericella nidulans
gttctcgagacgagcgatcgcgactatattatgactatatgaccattcaatgcgatg

SEQ ID NO: 29042 - DNA, 40 bp, Emericella nidulans
gaattcactgcggccgccatgggcgcagcgcttgcgtact

SEQ ID NO: 29043 - DNA, 55 bp, Emericella nidulans
gttctcgagacgagcgatcgcatatttcacaaacatgtggatcataattattcct

SEQ ID NO: 29044 - DNA, 46 bp, Emericella nidulans
gaattcactgcggccgccatggctttggagagcttcgtgaggagga

SEQ ID NO: 29045 - DNA, 42 bp, Emericella nidulans
gttctcgagacgagcgatcgctggcttcagccagaggtgcag

SEQ ID NO: 29046 - DNA, 41 bp, Emericella nidulans
gaattcactgcggccgccatgagccgcagtcgcttggatcg

SEQ ID NO: 29047 - DNA, 42 bp, Emericella nidulans
gttctcgagacgagcgatcgctgcccacaaatgtggctgtgc

SEQ ID NO: 29048 - DNA, 43 bp, Emericella nidulans
gaattcactgcggccgccatgccaccacatggatgtgccgaag

SEQ ID NO: 29049 - DNA, 54 bp, Emericella nidulans
gttctcgagacgagcgatcgctgatgtattgttgataataataaaatgccaggt

SEQ ID NO: 29050 - DNA, 47 bp, Emericella nidulans
gaattcactgcggccgccatgtcctgcaagataaaagcgacatttgc

SEQ ID NO: 29051 - DNA, 47 bp, Emericella nidulans
gttctcgagacgagcgatcgccgcacagaaatttgagcaaggcattt

SEQ ID NO: 29052 - DNA, 41 bp, Emericella nidulans
gaattcactgcggccgccatgcgctcagcgcccacaaccta

SEQ ID NO: 29053 - DNA, 57 bp, Emericella nidulans
gttctcgagacgagcgatcgcgtagaagtccgaagattaattttaactggtttaagg

SEQ ID NO: 29054 - DNA, 41 bp, Emericella nidulans
gaattcactgcggccgccatgaggcgacgcggcatgacgta

SEQ ID NO: 29055 - DNA, 56 bp, Emericella nidulans
gttctcgagacgagcgatcgctgattccggtgtatgttataggtataggtagatgg

SEQ ID NO: 29056 - DNA, 44 bp, Emericella nidulans
gaattcactgcggccgccatgtcgacacaatggctcccaagacc

SEQ ID NO: 29057 - DNA, 43 bp, Emericella nidulans
gttctcgagacgagcgatcgcgcaacgtcctgagcagccaaca

SEQ ID NO: 29058 - DNA, 41 bp, Emericella nidulans
gaattcactgcggccgccatgcgcgcaacatcagggcattc

SEQ ID NO: 29059 - DNA, 57 bp, Emericella nidulans
gttctcgagacgagcgatcgcatttttattttgtctaattactggtaatgatggctc

SEQ ID NO: 29060 - DNA, 41 bp, Emericella nidulans
gaattcactgcggccgccatggttcgcccttgcagcctccc

SEQ ID NO: 29061 - DNA, 41 bp, Emericella nidulans
gttctcgagacgagcgatcgcgcttcggcgtgtcctggtcc

SEQ ID NO: 29062 - DNA, 54 bp, Emericella nidulans
gaattcactgcggccgccatgttcgaaacttatatacctaactcacctttctcg

SEQ ID NO: 29063 - DNA, 46 bp, Emericella nidulans
gttctcgagacgagcgatcgcctcttcctcgcgctctatccgctca

SEQ ID NO: 29064 - DNA, 41 bp, Emericella nidulans
gaattcactgcggccgccatgttgccgaactgcccctttgg

SEQ ID NO: 29065 - DNA, 46 bp, Emericella nidulans
gttctcgagacgagcgatcgctacacaagtcattcatgcgttccct

SEQ ID NO: 29066 - DNA, 41 bp, Emericella nidulans
gaattcactgcggccgccatgcgcttgcagccattgcgact

SEQ ID NO: 29067 - DNA, 51 bp, Emericella nidulans
gttctcgagacgagcgatcgctcatgaaataaactaaagcaaagcaggaga

SEQ ID NO: 29068 - DNA, 41 bp, Emericella nidulans
gaattcactgcggccgccatgggcgcgaaagatgtgctgga

SEQ ID NO: 29069 - DNA, 57 bp, Emericella nidulans
gttctcgagacgagcgatcgcacagatgactgtaggttagtcaagatataaaacagg

SEQ ID NO: 29070 - DNA, 41 bp, Emericella nidulans
gaattcactgcggccgccatgtggcgacttgtcgggtgacg

SEQ ID NO: 29071 - DNA, 50 bp, Emericella nidulans
gttctcgagacgagcgatcgctgcgatatgctcaggagtattcttattga

SEQ ID NO: 29072 - DNA, 41 bp, Emericella nidulans
gaattcactgcggccgccatgcgctaccggcgacccatacg

SEQ ID NO: 29073 - DNA, 42 bp, Emericella nidulans
gttctcgagacgagcgatcgctgagtccgctttcggcgactg

SEQ ID NO: 29074 - DNA, 51 bp, Emericella nidulans
gaattcactgcggccgccatggctaggatttgaaggtcaatgtccttttcc

SEQ ID NO: 29075 - DNA, 41 bp, Emericella nidulans
gttctcgagacgagcgatcgcgtcgccacaggcgtgcagat

SEQ ID NO: 29076 - DNA, 49 bp, Emericella nidulans
gaattcactgcggccgccatggatgttcaaggaggaggagaaggattgc

SEQ ID NO: 29077 - DNA, 49 bp, Emericella nidulans; identical to SEQ ID NO: 28905

SEQ ID NO: 29078 - DNA, 50 bp, Emericella nidulans
gaattcactgcggccgccatgctaaggcatataaactgcccgttctctgg

SEQ ID NO: 29079 - DNA, 50 bp, Emericella nidulans
gttctcgagacgagcgatcgcgatgagaaggcattgtaagatcgggaaga

SEQ ID NO: 29080 - DNA, 45 bp, Emericella nidulans
gaattcactgcggccgccatgcgcctttcatcttgtggcgacatc

SEQ ID NO: 29081 - DNA, 41 bp, Emericella nidulans
gttctcgagacgagcgatcgcggacggaagcggggagaacg

SEQ ID NO: 29082 - DNA, 53 bp, Emericella nidulans
gaattcactgcggccgccatgtcaagtatatctggtctcatttcattcccatt

SEQ ID NO: 29083 - DNA, 56 bp, Emericella nidulans
gttctcgagacgagcgatcgcgcatagtatagtctttccctgaatattaactgagg

SEQ ID NO: 29084 - DNA, 42 bp, Emericella nidulans
gaattcactgcggccgccatgggctcgatcttcgtgccaacg

SEQ ID NO: 29085 - DNA, 41 bp, Emericella nidulans
gttctcgagacgagcgatcgcatggaacctcgccggtggtg

SEQ ID NO: 29086 - DNA, 42 bp, Emericella nidulans
gaattcactgcggccgccatggacgtgcgacttgcaggatga

SEQ ID NO: 29087 - DNA, 51 bp, Emericella nidulans
gttctcgagacgagcgatcgcctcttacttcatgaaccatctcctctacgc

SEQ ID NO: 29088 - DNA, 48 bp, Emericella nidulans
gaattcactgcggccgccatgtagcactgaatgcatctctcgactctt

SEQ ID NO: 29089 - DNA, 41 bp, Emericella nidulans
gttctcgagacgagcgatcgcgttcattggcgcgaggagca

SEQ ID NO: 29090 - DNA, 41 bp, Emericella nidulans
gaattcactgcggccgccatgcggccacgaggcaaccgtat

SEQ ID NO: 29091 - DNA, 41 bp, Emericella nidulans
gttctcgagacgagcgatcgcctagccgccagggcgatgaa

SEQ ID NO: 29092 - DNA, 41 bp, Emericella nidulans
gaattcactgcggccgccatgccaacggcgaaacgggcatt

SEQ ID NO: 29093 - DNA, 51 bp, Emericella nidulans
gttctcgagacgagcgatcgccaatgaacatcatccaattcagtctcatgc

SEQ ID NO: 29094 - DNA, 41 bp, Emericella nidulans
gaattcactgcggccgccatgtccgcgcacagttccgtcac

SEQ ID NO: 29095 - DNA, 47 bp, Emericella nidulans
gttctcgagacgagcgatcgcgccgagatgaattgtctggattgtgt

SEQ ID NO: 29096 - DNA, 47 bp, Emericella nidulans
gaattcactgcggccgccatggcaacacggtatattcttggcttgga

SEQ ID NO: 29097 - DNA, 42 bp, Emericella nidulans
gttctcgagacgagcgatcgcagggcaccctgagcatcggta

SEQ ID NO: 29098 - DNA, 42 bp, Emericella nidulans
gaattcactgcggccgccatgtcctctgcgccgcagcatatc

SEQ ID NO: 29099 - DNA, 57 bp, Emericella nidulans
gttctcgagacgagcgatcgcctccgtatgaatacatttactgataaaatctagctg

SEQ ID NO: 29100 - DNA, 41 bp, Emericella nidulans
gaattcactgcggccgccatgcctgacggcttgcgacgaga

SEQ ID NO: 29101 - DNA, 48 bp, Emericella nidulans
gttctcgagacgagcgatcgcgcgagattgttgtgaagtcgttgtctg

SEQ ID NO: 29102 - DNA, 41 bp, Emericella nidulans
gaattcactgcggccgccatgcaaccagcccaccagccaaa

SEQ ID NO: 29103 - DNA, 46 bp, Emericella nidulans
gttctcgagacgagcgatcgccgtcgacgttattttgggaaggagc

SEQ ID NO: 29104 - DNA, 42 bp, Emericella nidulans
gaattcactgcggccgccatgtcaggcagcaacagcgactcc

SEQ ID NO: 29105 - DNA, 48 bp, Emericella nidulans
gttctcgagacgagcgatcgcgccagggagattcattttattttgtga

SEQ ID NO: 29106 - DNA, 41 bp, Emericella nidulans
gaattcactgcggccgccatgttggggcgcgattaggacga

SEQ ID NO: 29107 - DNA, 41 bp, Emericella nidulans
gttctcgagacgagcgatcgctggccaacgttgccgcctat

SEQ ID NO: 29108 - DNA, 41 bp, Emericella nidulans
gaattcactgcggccgccatgtcgcagtcgcagcgaccatt

SEQ ID NO: 29109 - DNA, 57 bp, Emericella nidulans
gttctcgagacgagcgatcgcaataataaaataccatatctgcaaaatctcaacagc

SEQ ID NO: 29110 - DNA, 41 bp, Emericella nidulans
gaattcactgcggccgccatgtcaagtgccccggctgcttc

SEQ ID NO: 29111 - DNA, 50 bp, Emericella nidulans
gttctcgagacgagcgatcgcggagagaagaaactggtttttgacggaaa

SEQ ID NO: 29112 - DNA, 48 bp, Emericella nidulans
gaattcactgcggccgccatgggaatatggctcatgtcaagttttgga

SEQ ID NO: 29113 - DNA, 56 bp, Emericella nidulans
gttctcgagacgagcgatcgcgtcaattgtatgaattgtgctaacaataaccagga

SEQ ID NO: 29114 - DNA, 43 bp, Emericella nidulans
gaattcactgcggccgccatgtcgaccctcctcgatcgacaca

SEQ ID NO: 29115 - DNA, 46 bp, Emericella nidulans
gttctcgagacgagcgatcgctgccaacactggctttcattcactg

SEQ ID NO: 29116 - DNA, 41 bp, Emericella nidulans
gaattcactgcggccgccatgccccggtggcgaagggtact

SEQ ID NO: 29117 - DNA, 45 bp, Emericella nidulans
gttctcgagacgagcgatcgctccagcgcctaagcagttgagaca

SEQ ID NO: 29118 - DNA, 41 bp, Emericella nidulans; identical to SEQ ID NO: 29116

SEQ ID NO: 29119 - DNA, 45 bp, Emericella nidulans; identical to SEQ ID NO: 29117

SEQ ID NO: 29120 - DNA, 44 bp, Emericella nidulans
gaattcactgcggccgccatgatccgcctatgccctgcaggttt

SEQ ID NO: 29121 - DNA, 43 bp, Emericella nidulans
gttctcgagacgagcgatcgcggcaactccgcttttcgacctg

SEQ ID NO: 29122 - DNA, 41 bp, Emericella nidulans
gaattcactgcggccgccatgccttggctcggccacgtctc

SEQ ID NO: 29123 - DNA, 47 bp, Emericella nidulans
gttctcgagacgagcgatcgcagtcaggagaatcaatccctggtttt

SEQ ID NO: 29124 - DNA, 41 bp, Emericella nidulans
gaattcactgcggccgccatgcgtaccaactgcgccgacaa

SEQ ID NO: 29125 - DNA, 42 bp, Emericella nidulans
gttctcgagacgagcgatcgcgctgtgccatggcatcactgg

SEQ ID NO: 29126 - DNA, 42 bp, Emericella nidulans
gaattcactgcggccgccatggcttgtggcagccaagcgttc

SEQ ID NO: 29127 - DNA, 40 bp, Emericella nidulans
gttctcgagacgagcgatcgccccgcgcgaggtgacattg

SEQ ID NO: 29128 - DNA, 43 bp, Emericella nidulans
gaattcactgcggccgccatgggtggttggattgggtgcgaaa

SEQ ID NO: 29129 - DNA, 52 bp, Emericella nidulans
gttctcgagacgagcgatcgcagaatcctcttttcctctattgaaagtaggc

SEQ ID NO: 29130 - DNA, 41 bp, Emericella nidulans
gaattcactgcggccgccatgagccggctctccagcacgac

SEQ ID NO: 29131 - DNA, 41 bp, Emericella nidulans
gttctcgagacgagcgatcgctcggccaggtcacgcacaag

SEQ ID NO: 29132 - DNA, 55 bp, Emericella nidulans
gaattcactgcggccgccatgatgtgtacattatacgtccttgtctagagcttgc

SEQ ID NO: 29133 - DNA, 47 bp, Emericella nidulans
gttctcgagacgagcgatcgcaggttcgttgagtgtttctcgtgagc

SEQ ID NO: 29134 - DNA, 45 bp, Emericella nidulans
gaattcactgcggccgccatgcgactggtggtcaggtgaattgga

SEQ ID NO: 29135 - DNA, 57 bp, Emericella nidulans
gttctcgagacgagcgatcgcggtagttatcacttgtaaaagaagcaggtgcttgga

SEQ ID NO: 29136 - DNA, 49 bp, Emericella nidulans
gaattcactgcggccgccatgtgtcaacaagataggtgtcaatcgtcat

SEQ ID NO: 29137 - DNA, 41 bp, Emericella nidulans
gttctcgagacgagcgatcgctgggttgcggtgcaggttga

SEQ ID NO: 29138 - DNA, 42 bp, Emericella nidulans
gaattcactgcggccgccatgccctcctgaaggcccctcatc

SEQ ID NO: 29139 - DNA, 47 bp, Emericella nidulans
gttctcgagacgagcgatcgctaaacccggttgacactgtcaatgaa

SEQ ID NO: 29140 - DNA, 51 bp, Emericella nidulans
gaattcactgcggccgccatgacagtatcagaaagtcgacctcttcccacc

SEQ ID NO: 29141 - DNA, 42 bp, Emericella nidulans
gttctcgagacgagcgatcgctccggtgtcggccctacaggt

SEQ ID NO: 29142 - DNA, 41 bp, Emericella nidulans
gaattcactgcggccgccatggccgccgtaccgagtggatg

SEQ ID NO: 29143 - DNA, 50 bp, Emericella nidulans
gttctcgagacgagcgatcgctatctaggcgagatcctagactgcccctc

SEQ ID NO: 29144 - DNA, 41 bp, Emericella nidulans
gaattcactgcggccgccatgcctgcaccgcactgcatctg

SEQ ID NO: 29145 - DNA, 47 bp, Emericella nidulans
gttctcgagacgagcgatcgctgcttgcctgaacgaatgttagctcc

SEQ ID NO: 29146 - DNA, 41 bp, Emericella nidulans; identical to SEQ ID NO: 29144

SEQ ID NO: 29147 - DNA, 47 bp, Emericella nidulans; identical to SEQ ID NO: 29145

SEQ ID NO: 29148 - DNA, 41 bp, Emericella nidulans; identical to SEQ ID NO: 29144

SEQ ID NO: 29149 - DNA, 47 bp, Emericella nidulans; identical to SEQ ID NO: 29145

SEQ ID NO: 29150 - DNA, 41 bp, Emericella nidulans; identical to SEQ ID NO: 29144

SEQ ID NO: 29151 - DNA, 47 bp, Emericella nidulans; identical to SEQ ID NO: 29145

SEQ ID NO: 29152 - DNA, 44 bp, Emericella nidulans
gaattcactgcggccgccatgtgcctcttgccaggtcaaaacca

SEQ ID NO: 29153 - DNA, 41 bp, Emericella nidulans
gttctcgagacgagcgatcgcccccactgagacccgcagga

SEQ ID NO: 29154 - DNA, 50 bp, Emericella nidulans
gaattcactgcggccgccatggtccagtccctcattctcaagcctcttct

SEQ ID NO: 29155 - DNA, 53 bp, Emericella nidulans
gttctcgagacgagcgatcgcgatcttggatgccaatgaggactggtaattgt

SEQ ID NO: 29156 - DNA, 43 bp, Emericella nidulans
gaattcactgcggccgccatgccacgccgaatgcgtctactga

SEQ ID NO: 29157 - DNA, 55 bp, Emericella nidulans
gttctcgagacgagcgatcgctaccttggattaagttcattgctatgttagaaag

SEQ ID NO: 29158 - DNA, 41 bp, Emericella nidulans
gaattcactgcggccgccatggcgctgcagatggaggacca

SEQ ID NO: 29159 - DNA, 49 bp, Emericella nidulans
gttctcgagacgagcgatcgcgtttgatttcttaaacggtgctgcctgt

SEQ ID NO: 29160 - DNA, 57 bp, Emericella nidulans
gaattcactgcggccgccatgaaaaatagggctcttttaggagccttatgggcgaaa

SEQ ID NO: 29161 - DNA, 55 bp, Emericella nidulans
gttctcgagacgagcgatcgcgctcgatagtgtaagaattagaccttgccgtcgt

SEQ ID NO: 29162 - DNA, 42 bp, Emericella nidulans
gaattcactgcggccgccatgtcttggcccttgctgctggtg

SEQ ID NO: 29163 - DNA, 46 bp, Emericella nidulans
gttctcgagacgagcgatcgctcccagattcacctaagcggtagca

SEQ ID NO: 29164 - DNA, 47 bp, Emericella nidulans
gaattcactgcggccgccatgaaccggtgcgttctctctacgtatcc

SEQ ID NO: 29165 - DNA, 41 bp, Emericella nidulans
gttctcgagacgagcgatcgctcacggtcgcgacttcgtca

SEQ ID NO: 29166 - DNA, 52 bp, Emericella nidulans
gaattcactgcggccgccatgaaccaaactacccacgacatacaatagagga

SEQ ID NO: 29167 - DNA, 57 bp, Emericella nidulans
gttctcgagacgagcgatcgcacgctttgtccttatctttattctgcatgataaccc

SEQ ID NO: 29168 - DNA, 41 bp, Emericella nidulans
gaattcactgcggccgccatggctgaagcagccgtggttgg

SEQ ID NO: 29169 - DNA, 50 bp, Emericella nidulans
gttctcgagacgagcgatcgcgcagagttggcaagtattctgtctattca

SEQ ID NO: 29170 - DNA, 49 bp, Emericella nidulans
gaattcactgcggccgccatgtttcgtgcaagtactaagacctcaatca

SEQ ID NO: 29171 - DNA, 44 bp, Emericella nidulans
gttctcgagacgagcgatcgctgaagctgccttgaacgaagtga

SEQ ID NO: 29172 - DNA, 41 bp, Emericella nidulans
gaattcactgcggccgccatgccgccctgcccttcattcct

SEQ ID NO: 29173 - DNA, 47 bp, Emericella nidulans
gttctcgagacgagcgatcgcgtcagtcatacagcccttcacctccc

SEQ ID NO: 29174 - DNA, 46 bp, Emericella nidulans
gaattcactgcggccgccatgcgacgtttagaccggacgctatgtg

SEQ ID NO: 29175 - DNA, 54 bp, Emericella nidulans
gttctcgagacgagcgatcgcttgaccaagaatgcgtgacatataatagtttgc

SEQ ID NO: 29176 - DNA, 43 bp, Emericella nidulans
gaattcactgcggccgccatgtcaaaacgcggtacgtgcagga

SEQ ID NO: 29177 - DNA, 44 bp, Emericella nidulans
gttctcgagacgagcgatcgctgagtgcccttaaggcgttgcat

SEQ ID NO: 29178 - DNA, 49 bp, Emericella nidulans
gaattcactgcggccgccatgggctggcaaaagattaagaacaaggtgg

SEQ ID NO: 29179 - DNA, 41 bp, Emericella nidulans
gttctcgagacgagcgatcgcgtggctggggtcagccgtgt

SEQ ID NO: 29180 - DNA, 54 bp, Emericella nidulans
gaattcactgcggccgccatggctagttcttatagctacacatcagggccaagc

SEQ ID NO: 29181 - DNA, 50 bp, Emericella nidulans
gttctcgagacgagcgatcgctcccacctctatcagtagtattcgccaga

SEQ ID NO: 29182 - DNA, 41 bp, Emericella nidulans; identical to SEQ ID NO: 29102

SEQ ID NO: 29183 - DNA, 44 bp, Emericella nidulans
gttctcgagacgagcgatcgctgcgttttcaacgagcacggaag

SEQ ID NO: 29184 - DNA, 41 bp, Emericella nidulans
gaattcactgcggccgccatgacggcgacgagttgccttcg

SEQ ID NO: 29185 - DNA, 41 bp, Emericella nidulans
gttctcgagacgagcgatcgcgggcccaggcattcagggag

SEQ ID NO: 29186 - DNA, 41 bp, Emericella nidulans
gaattcactgcggccgccatgcgcccctcattggacgggta

SEQ ID NO: 29187 - DNA, 54 bp, Emericella nidulans
gttctcgagacgagcgatcgcagaatcacccagcaactatcttttgtattgtgc

SEQ ID NO: 29188 - DNA, 43 bp, Emericella nidulans
gaattcactgcggccgccatgcgaacacaatcggcgacgcaat

SEQ ID NO: 29189 - DNA, 57 bp, Emericella nidulans
gttctcgagacgagcgatcgcatatagacatattatagaacacggcctatacatcca

SEQ ID NO: 29190 - DNA, 51 bp, Emericella nidulans
gaattcactgcggccgccatgaagggcgagacaattaacgtcgtcaataca

SEQ ID NO: 29191 - DNA, 55 bp, Emericella nidulans
gttctcgagacgagcgatcgcaatgggcaattatgaaatgtattgtgctcggaga

SEQ ID NO: 29192 - DNA, 43 bp, Emericella nidulans
gaattcactgcggccgccatgtggccggtttcttaggaggtgc

SEQ ID NO: 29193 - DNA, 41 bp, Emericella nidulans
gttctcgagacgagcgatcgcggtgcccggacgattatccc

SEQ ID NO: 29194 - DNA, 42 bp, Emericella nidulans
gaattcactgcggccgccatggcgatgacagcactcggcgta

SEQ ID NO: 29195 - DNA, 51 bp, Emericella nidulans
gttctcgagacgagcgatcgcgtttttaatcttttcagctgtgcgagtgga

SEQ ID NO: 29196 - DNA, 41 bp, Emericella nidulans
gaattcactgcggccgccatgtggtcttccccaggcgcaaa

SEQ ID NO: 29197 - DNA, 57 bp, Emericella nidulans
gttctcgagacgagcgatcgcttgattcttatacggtagtataatgtcactcgcaat

SEQ ID NO: 29198 - DNA, 42 bp, Emericella nidulans
gaattcactgcggccgccatgtggaaactccggtggacgtga

SEQ ID NO: 29199 - DNA, 55 bp, Emericella nidulans
gttctcgagacgagcgatcgctggcaccaaatagaaattatgcaatagcaatagg

SEQ ID NO: 29200 - DNA, 41 bp, Emericella nidulans
gaattcactgcggccgccatgtctgtgccggcgttgtggtc

SEQ ID NO: 29201 - DNA, 41 bp, Emericella nidulans
gttctcgagacgagcgatcgctgccataccagccctctcca

SEQ ID NO: 29202 - DNA, 43 bp, Emericella nidulans
gaattcactgcggccgccatgtgcagggtctgagggtgttacc

SEQ ID NO: 29203 - DNA, 44 bp, Emericella nidulans
gttctcgagacgagcgatcgcgcgacggggtcaaaatgattaaa

SEQ ID NO: 29204 - DNA, 47 bp, Emericella nidulans
gaattcactgcggccgccatgtcactcagctacagagccataccaca

SEQ ID NO: 29205 - DNA, 43 bp, Emericella nidulans
gttctcgagacgagcgatcgcttcgttcacgaaatccgcttca

SEQ ID NO: 29206 - DNA, 51 bp, Emericella nidulans
gaattcactgcggccgccatgcacatattgctagacaacaagtccgactga

SEQ ID NO: 29207 - DNA, 41 bp, Emericella nidulans
gttctcgagacgagcgatcgctgtcgcgcccgtcgatacaa

SEQ ID NO: 29208 - DNA, 40 bp, Emericella nidulans
gaattcactgcggccgccatgttggcggcgctcccaaaat

SEQ ID NO: 29209 - DNA, 41 bp, Emericella nidulans
gttctcgagacgagcgatcgcacgcaacaagaccggccaga

SEQ ID NO: 29210 - DNA, 41 bp, Emericella nidulans
gaattcactgcggccgccatgcgtccaccttgcggccctac

SEQ ID NO: 29211 - DNA, 53 bp, Emericella nidulans
gttctcgagacgagcgatcgcgtccacgcaatctcagttagaagaaatatccc

SEQ ID NO: 29212 - DNA, 41 bp, Emericella nidulans
gaattcactgcggccgccatgcgccgccctgatctctgtcc

SEQ ID NO: 29213 - DNA, 45 bp, Emericella nidulans
gttctcgagacgagcgatcgctccccttagcatgcttcttcttcg

SEQ ID NO: 29214 - DNA, 51 bp, Emericella nidulans
gaattcactgcggccgccatgctatcgcttcaatccgttactactggttca

SEQ ID NO: 29215 - DNA, 44 bp, Emericella nidulans
gttctcgagacgagcgatcgctgtgctctcagcaaatgacgaaa

SEQ ID NO: 29216 - DNA, 43 bp, Emericella nidulans
gaattcactgcggccgccatggattcacgaaattcgcggagca

SEQ ID NO: 29217 - DNA, 45 bp, Emericella nidulans
gttctcgagacgagcgatcgcaaggtgtgttaccagtcccaacca

SEQ ID NO: 29218 - DNA, 43 bp, Emericella nidulans
gaattcactgcggccgccatgccaccggaagacacatcgttcg

SEQ ID NO: 29219 - DNA, 48 bp, Emericella nidulans
gttctcgagacgagcgatcgcgttggaaaagtgaatggattgagatga

SEQ ID NO: 29220 - DNA, 48 bp, Emericella nidulans
gaattcactgcggccgccatggtcaccttaccttgccttctacttcca

SEQ ID NO: 29221 - DNA, 41 bp, Emericella nidulans
gttctcgagacgagcgatcgcagcggctgccgcagacaaat

SEQ ID NO: 29222 - DNA, 42 bp, Emericella nidulans
gaattcactgcggccgccatgagcgcatacacccgttgaaca

SEQ ID NO: 29223 - DNA, 52 bp, Emericella nidulans
gttctcgagacgagcgatcgcaaacactatgttgtattaacgagcccaagga

SEQ ID NO: 29224 - DNA, 45 bp, Emericella nidulans
gaattcactgcggccgccatgctttcgagaggtgcgtcgaaaaca

SEQ ID NO: 29225 - DNA, 48 bp, Emericella nidulans
gttctcgagacgagcgatcgcccaggtctatccttggttgacctaccg

SEQ ID NO: 29226 - DNA, 45 bp, Emericella nidulans; identical to SEQ ID NO: 29224

SEQ ID NO: 29227 - DNA, 48 bp, Emericella nidulans; identical to SEQ ID NO: 29225

SEQ ID NO: 29228 - DNA, 42 bp, Emericella nidulans
gaattcactgcggccgccatgccgctccccatatgcatggac

SEQ ID NO: 29229 - DNA, 45 bp, Emericella nidulans
gttctcgagacgagcgatcgcgctttggtgggtcagtgagaggga

SEQ ID NO: 29230 - DNA, 53 bp, Emericella nidulans
gaattcactgcggccgccatgcaaaatgttgttgttcagctgtttattcctca

SEQ ID NO: 29231 - DNA, 41 bp, Emericella nidulans
gttctcgagacgagcgatcgcgcgaatcatgcccaccaagc

SEQ ID NO: 29232 - DNA, 55 bp, Emericella nidulans
gaattcactgcggccgccatgcatatcttatcacaaattagcacaatgtcctctc

SEQ ID NO: 29233 - DNA, 48 bp, Emericella nidulans
gttctcgagacgagcgatcgccccatcatgctacacaagtcagcattc

SEQ ID NO: 29234 - DNA, 43 bp, Emericella nidulans
gaattcactgcggccgccatgccggaaggcagtaccacaacca

SEQ ID NO: 29235 - DNA, 54 bp, Emericella nidulans
gttctcgagacgagcgatcgctttcgtgtcaatatatcctacaaatcggattga

SEQ ID NO: 29236 - DNA, 46 bp, Emericella nidulans
gaattcactgcggccgccatgggtcttcagggaggagacagaccgt

SEQ ID NO: 29237 - DNA, 41 bp, Emericella nidulans
gttctcgagacgagcgatcgccgtccgctcgccgtcttcct

SEQ ID NO: 29238 - DNA, 46 bp, Emericella nidulans; identical to SEQ ID NO: 29236

SEQ ID NO: 29239 - DNA, 41 bp, Emericella nidulans; identical to SEQ ID NO: 29237

SEQ ID NO: 29240 - DNA, 41 bp, Emericella nidulans
gaattcactgcggccgccatgcgaacagcccgccaaattcc

SEQ ID NO: 29241 - DNA, 46 bp, Emericella nidulans
gttctcgagacgagcgatcgccggaagtaacaaatgcgttctgaca

SEQ ID NO: 29242 - DNA, 44 bp, Emericella nidulans
gaattcactgcggccgccatgcaccggaacttatgcggaaagca

SEQ ID NO: 29243 - DNA, 54 bp, Emericella nidulans
gttctcgagacgagcgatcgctaaaaggaggatatcattcagttacatctagcc

SEQ ID NO: 29244 - DNA, 41 bp, Emericella nidulans
gaattcactgcggccgccatgcgacgacacccgcttctccc

SEQ ID NO: 29245 - DNA, 55 bp, Emericella nidulans
gttctcgagacgagcgatcgctcaaaagtaacaagccatatgctcttgccattac

SEQ ID NO: 29246 - DNA, 41 bp, Emericella nidulans
gaattcactgcggccgccatggccgcaagcctaccgccata

SEQ ID NO: 29247 - DNA, 48 bp, Emericella nidulans
gttctcgagacgagcgatcgccttgttcaaagcgatgagttcattgag

SEQ ID NO: 29248 - DNA, 41 bp, Emericella nidulans; identical to SEQ ID NO: 29246

SEQ ID NO: 29249 - DNA, 48 bp, Emericella nidulans; identical to SEQ ID NO: 29247

SEQ ID NO: 29250 - DNA, 57 bp, Emericella nidulans
gaattcactgcggccgccatgaagaactacatcaattctaccgtcttactaccatgc

SEQ ID NO: 29251 - DNA, 51 bp, Emericella nidulans
gttctcgagacgagcgatcgccatgagtcgtaaagagaacaaaaggcatca

SEQ ID NO: 29252 - DNA, 41 bp, Emericella nidulans
gaattcactgcggccgccatgagcggcgggactgtgtggtc

SEQ ID NO: 29253 - DNA, 48 bp, Emericella nidulans
gttctcgagacgagcgatcgctaagttacgcagtaactcccaacagca

SEQ ID NO: 29254 - DNA, 41 bp, Emericella nidulans
gaattcactgcggccgccatggcatttgaggaccgcgcaca

SEQ ID NO: 29255 - DNA, 47 bp, Emericella nidulans
gttctcgagacgagcgatcgcccagttgaatgctactgcgcacaatg

SEQ ID NO: 29256 - DNA, 57 bp, Emericella nidulans
gaattcactgcggccgccatgaaggtctgcgaattctctgcgcgagtgagtatttat

SEQ ID NO: 29257 - DNA, 42 bp, Emericella nidulans
gttctcgagacgagcgatcgccacgtcagcatcccgacgaca

SEQ ID NO: 29258 - DNA, 53 bp, Emericella nidulans
gaattcactgcggccgccatgctccttatatccggattgtaaacggccagcta

SEQ ID NO: 29259 - DNA, 47 bp, Emericella nidulans
gttctcgagacgagcgatcgctgcaacgtgaaaataccatgcaaagg

SEQ ID NO: 29260 - DNA, 41 bp, Emericella nidulans; identical to SEQ ID NO: 29200

SEQ ID NO: 29261 - DNA, 40 bp, Emericella nidulans
gttctcgagacgagcgatcgcccaactccgcgggagtgcc

SEQ ID NO: 29262 - DNA, 42 bp, Emericella nidulans
gaattcactgcggccgccatgcgcgcagtgggtacgagaagc

SEQ ID NO: 29263 - DNA, 57 bp, Emericella nidulans
gttctcgagacgagcgatcgcacacatgccataagtccaaattctgaactcaaaaac

SEQ ID NO: 29264 - DNA, 42 bp, Emericella nidulans
gaattcactgcggccgccatggcaatccccaccttccgtcca

SEQ ID NO: 29265 - DNA, 41 bp, Emericella nidulans
gttctcgagacgagcgatcgcccccctctcctctgcccaca

SEQ ID NO: 29266 - DNA, 40 bp, Emericella nidulans
gaattcactgcggccgccatggagcctgcgcccccttgac

SEQ ID NO: 29267 - DNA, 42 bp, Emericella nidulans
gttctcgagacgagcgatcgctggacgctgccaacctcctca

SEQ ID NO: 29268 - DNA, 41 bp, Emericella nidulans
gaattcactgcggccgccatgtccttggtccgcaaggctca

SEQ ID NO: 29269 - DNA, 41 bp, Emericella nidulans
gttctcgagacgagcgatcgcccatcgactgccggctcgac

SEQ ID NO: 29270 - DNA, 41 bp, Emericella nidulans
gaattcactgcggccgccatgctgcgccgactggggatgac

SEQ ID NO: 29271 - DNA, 41 bp, Emericella nidulans
gttctcgagacgagcgatcgcatgcggggctcgaatcctcc

SEQ ID NO: 29272 - DNA, 41 bp, Emericella nidulans
gaattcactgcggccgccatgccgacccaccgggtactgga

SEQ ID NO: 29273 - DNA, 48 bp, Emericella nidulans
gttctcgagacgagcgatcgcgctgaactgatggcttctatggcgtct

SEQ ID NO: 29274 - DNA, 41 bp, Emericella nidulans
gaattcactgcggccgccatgcgttgctcccgccgatgtct

SEQ ID NO: 29275 - DNA, 42 bp, Emericella nidulans
gttctcgagacgagcgatcgcccgaagcccatgtcctcatcg

SEQ ID NO: 29276 - DNA, 44 bp, Emericella nidulans
gaattcactgcggccgccatgtgaaaacgcagacggagggttct

SEQ ID NO: 29277 - DNA, 57 bp, Emericella nidulans
gttctcgagacgagcgatcgctatttaagtaagcatcgtatgcctagtactggtttt

SEQ ID NO: 29278 - DNA, 41 bp, Emericella nidulans; identical to SEQ ID NO: 29110

SEQ ID NO: 29279 - DNA, 42 bp, Emericella nidulans
gttctcgagacgagcgatcgccgtcgcccctatgccttctgg

SEQ ID NO: 29280 - DNA, 54 bp, Emericella nidulans
gaattcactgcggccgccatgccttacggagtactgattactgactcggtctct

SEQ ID NO: 29281 - DNA, 45 bp, Emericella nidulans
gttctcgagacgagcgatcgcggccatagcctactcaaaccacac

SEQ ID NO: 29282 - DNA, 49 bp, Emericella nidulans
gaattcactgcggccgccatgttttcctagtcgttcttcacctgcaagc

SEQ ID NO: 29283 - DNA, 44 bp, Emericella nidulans
gttctcgagacgagcgatcgcgcaacgccagtgtcaagtcacca

SEQ ID NO: 29284 - DNA, 49 bp, Emericella nidulans
gaattcactgcggccgccatggatggtgaagatgctaccaagtccgttt

SEQ ID NO: 29285 - DNA, 57 bp, Emericella nidulans
gttctcgagacgagcgatcgcaaatcctctagtattagcgagcttataaacttttcg

SEQ ID NO: 29286 - DNA, 54 bp, Emericella nidulans
gaattcactgcggccgccatgggataggtgtcactatatttattcgccataacg

SEQ ID NO: 29287 - DNA, 42 bp, Emericella nidulans
gttctcgagacgagcgatcgctccgccgtttgaagacaccca

SEQ ID NO: 29288 - DNA, 51 bp, Emericella nidulans
gaattcactgcggccgccatgaccaagctcgagacttccgacggaattaaa

SEQ ID NO: 29289 - DNA, 41 bp, Emericella nidulans
gttctcgagacgagcgatcgcatcgcccccttggtcgatgc

SEQ ID NO: 29290 - DNA, 42 bp, Emericella nidulans
gaattcactgcggccgccatgcgaacccaaagcgctctgcaa

SEQ ID NO: 29291 - DNA, 55 bp, Emericella nidulans
gttctcgagacgagcgatcgcatatcaattctccagacaaatacgtattcacaga

SEQ ID NO: 29292 - DNA, 41 bp, Emericella nidulans
gaattcactgcggccgccatgtcccaacgcgctcgtaccct

SEQ ID NO: 29293 - DNA, 42 bp, Emericella nidulans
gttctcgagacgagcgatcgctcgcagtggtatcgcaaaagc

SEQ ID NO: 29294 - DNA, 41 bp, Emericella nidulans
gaattcactgcggccgccatgacggcgagctgcctgagcat

SEQ ID NO: 29295 - DNA, 55 bp, Emericella nidulans
gttctcgagacgagcgatcgctatcataaccctttcataaatctatcatccaagc

SEQ ID NO: 29296 - DNA, 42 bp, Emericella nidulans
gaattcactgcggccgccatgccccactacctgtcgcccaaa

SEQ ID NO: 29297 - DNA, 53 bp, Emericella nidulans
gttctcgagacgagcgatcgcccaaatgctctccattcttatctacagtctcg

SEQ ID NO: 29298 - DNA, 43 bp, Emericella nidulans
gaattcactgcggccgccatgtcgaacgttcaggccactacca

SEQ ID NO: 29299 - DNA, 50 bp, Emericella nidulans
gttctcgagacgagcgatcgcaaattgagtccgagttgaaaacattgtga

SEQ ID NO: 29300 - DNA, 51 bp, Emericella nidulans
gaattcactgcggccgccatggaacagaaatctccagtggaacaaaagggt

SEQ ID NO: 29301 - DNA, 40 bp, Emericella nidulans; identical to SEQ ID NO: 29127

SEQ ID NO: 29302 - DNA, 42 bp, Emericella nidulans
gaattcactgcggccgccatgtcgggctcaccaaggtcaagg

SEQ ID NO: 29303 - DNA, 43 bp, Emericella nidulans
gttctcgagacgagcgatcgctgccacaaggcagtgtgcatga

SEQ ID NO: 29304 - DNA, 41 bp, Emericella nidulans
gaattcactgcggccgccatggcttggcacgggttcgcact

SEQ ID NO: 29305 - DNA, 50 bp, Emericella nidulans
gttctcgagacgagcgatcgcacggctgaagtagatttgcgataagagca

SEQ ID NO: 29306 - DNA, 56 bp, Emericella nidulans
gaattcactgcggccgccatgtaaggataagagcaaggatgataagaaagctatgc

SEQ ID NO: 29307 - DNA, 51 bp, Emericella nidulans
gttctcgagacgagcgatcgcgcagtgcacatttgtagtcgttaaggctga

SEQ ID NO: 29308 - DNA, 45 bp, Emericella nidulans
gaattcactgcggccgccatgctatcttcatccacgctccctccc

SEQ ID NO: 29309 - DNA, 43 bp, Emericella nidulans
gttctcgagacgagcgatcgcggcctgctagcacttcgccgta

SEQ ID NO: 29310 - DNA, 43 bp, Emericella nidulans
gaattcactgcggccgccatgtctcgattgattcgcccttcca

SEQ ID NO: 29311 - DNA, 56 bp, Emericella nidulans
gttctcgagacgagcgatcgcggtcgtagtcaagtgtatatactccttcggaatca

SEQ ID NO: 29312 - DNA, 42 bp, Emericella nidulans
gaattcactgcggccgccatgccggcaggaaatcatcacggt

SEQ ID NO: 29313 - DNA, 41 bp, Emericella nidulans
gttctcgagacgagcgatcgcgctttcgcggcgtccctgag

SEQ ID NO: 29314 - DNA, 41 bp, Emericella nidulans
gaattcactgcggccgccatgcgcggacgaccacgggtcta

SEQ ID NO: 29315 - DNA, 41 bp, Emericella nidulans
gttctcgagacgagcgatcgcccattcaacccagccgggac

SEQ ID NO: 29316 - DNA, 46 bp, Emericella nidulans
gaattcactgcggccgccatggccaaatcaatctctcctgctgacg

SEQ ID NO: 29317 - DNA, 57 bp, Emericella nidulans
gttctcgagacgagcgatcgctaaatctatcaagatacctatttctgagtatgtgcc

SEQ ID NO: 29318 - DNA, 42 bp, Emericella nidulans
gaattcactgcggccgccatgtctccagcccttccagccata

SEQ ID NO: 29319 - DNA, 41 bp, Emericella nidulans
gttctcgagacgagcgatcgcgggctgcctcgcatttctgc

SEQ ID NO: 29320 - DNA, 41 bp, Emericella nidulans
gaattcactgcggccgccatgagcgcgttcgccgtctcaag

SEQ ID NO: 29321 - DNA, 51 bp, Emericella nidulans
gttctcgagacgagcgatcgcgtttgcgaactttttggtttcgtattgagg

SEQ ID NO: 29322 - DNA, 41 bp, Emericella nidulans
gaattcactgcggccgccatgcgggtgggctggatgagatg

SEQ ID NO: 29323 - DNA, 41 bp, Emericella nidulans
gttctcgagacgagcgatcgctgctgccaggaggtgccaga

SEQ ID NO: 29324 - DNA, 41 bp, Emericella nidulans
gaattcactgcggccgccatgcgttggcggcctcatcctcc

SEQ ID NO: 29325 - DNA, 50 bp, Emericella nidulans
gttctcgagacgagcgatcgcagtaacaaaggccgtcgtatttcattatc

SEQ ID NO: 29326 - DNA, 41 bp, Emericella nidulans
gaattcactgcggccgccatgttccgccttcccccattggt

SEQ ID NO: 29327 - DNA, 47 bp, Emericella nidulans
gttctcgagacgagcgatcgcgtaggagacgacggagtacatcgaca

SEQ ID NO: 29328 - DNA, 52 bp, Emericella nidulans
gaattcactgcggccgccatgtgcaacaactatcagtcattatgttctcaag

SEQ ID NO: 29329 - DNA, 57 bp, Emericella nidulans
gttctcgagacgagcgatcgcatatacattaacagcacacgaaacttaaaatacagg

SEQ ID NO: 29330 - DNA, 41 bp, Emericella nidulans
gaattcactgcggccgccatggacgggctgcgcgaggtatc

SEQ ID NO: 29331 - DNA, 55 bp, Emericella nidulans
gttctcgagacgagcgatcgccaaatatacagccagattctattttcatctctcg

SEQ ID NO: 29332 - DNA, 44 bp, Emericella nidulans
gaattcactgcggccgccatgttcacaagtctccagcccttcca

SEQ ID NO: 29333 - DNA, 41 bp, Emericella nidulans; identical to SEQ ID NO: 29319

SEQ ID NO: 29334 - DNA, 41 bp, Emericella nidulans
gaattcactgcggccgccatgtgggctggagccatgaacga

SEQ ID NO: 29335 - DNA, 42 bp, Emericella nidulans
gttctcgagacgagcgatcgccctcgggatccaaagcaccgt

SEQ ID NO: 29336 - DNA, 46 bp, Emericella nidulans
gaattcactgcggccgccatgggtcaacgtcatagatgggcaggtc

SEQ ID NO: 29337 - DNA, 41 bp, Emericella nidulans
gttctcgagacgagcgatcgcgccgaagcggaagggtgaca

SEQ ID NO: 29338 - DNA, 48 bp, Emericella nidulans
gaattcactgcggccgccatgcgctgagactatatatctgggcagacg

SEQ ID NO: 29339 - DNA, 43 bp, Emericella nidulans
gttctcgagacgagcgatcgctgaacgagcctcgctttgaggg

SEQ ID NO: 29340 - DNA, 47 bp, Emericella nidulans
gaattcactgcggccgccatgtggggtccactttacaaagccattca

SEQ ID NO: 29341 - DNA, 55 bp, Emericella nidulans
gttctcgagacgagcgatcgcaagtttggcaccttgtttatcattaaaatctatc

SEQ ID NO: 29342 - DNA, 48 bp, Emericella nidulans
gaattcactgcggccgccatgatgatgatctccaatcaaagggccaaa

SEQ ID NO: 29343 - DNA, 44 bp, Emericella nidulans
gttctcgagacgagcgatcgcggcatgagcattatcggcaacga

SEQ ID NO: 29344 - DNA, 42 bp, Emericella nidulans
gaattcactgcggccgccatggccgtgtacctcgcctacacc

SEQ ID NO: 29345 - DNA, 57 bp, Emericella nidulans
gttctcgagacgagcgatcgcaatagatactctgataagtattgtgtgtgtcaaccc

SEQ ID NO: 29346 - DNA, 45 bp, Emericella nidulans
gaattcactgcggccgccatgcgtacggcgtatacccgatcgaaa

SEQ ID NO: 29347 - DNA, 57 bp, Emericella nidulans
gttctcgagacgagcgatcgcatggctgatataatatgcatttatcagcttcgatgt

SEQ ID NO: 29348 - DNA, 45 bp, Emericella nidulans
gaattcactgcggccgccatgcgcttcgttttgctacgactgacg

SEQ ID NO: 29349 - DNA, 50 bp, Emericella nidulans
gttctcgagacgagcgatcgctgagagaatcatgccagttttctcaactt

SEQ ID NO: 29350 - DNA, 54 bp, Emericella nidulans
gaattcactgcggccgccatgaatgatatgtatataacgcactcgagcttattg

SEQ ID NO: 29351 - DNA, 43 bp, Emericella nidulans
gttctcgagacgagcgatcgctccatccgctttgtgtccatga

SEQ ID NO: 29352 - DNA, 41 bp, Emericella nidulans; identical to SEQ ID NO: 29200

SEQ ID NO: 29353 - DNA, 49 bp, Emericella nidulans
gttctcgagacgagcgatcgctgtcttccaaataccgtcatttatttgc

SEQ ID NO: 29354 - DNA, 51 bp, Emericella nidulans
gaattcactgcggccgccatgagtcaaagcaaactatcgacactctcatcc

SEQ ID NO: 29355 - DNA, 50 bp, Emericella nidulans
gttctcgagacgagcgatcgcgaacggtattgaatttacggaacgagtcc

SEQ ID NO: 29356 - DNA, 53 bp, Emericella nidulans
gaattcactgcggccgccatggcagacttggtttttaggtagaatcaagagca

SEQ ID NO: 29357 - DNA, 48 bp, Emericella nidulans
gttctcgagacgagcgatcgccatattgctgacgctttttctcaatgc

SEQ ID NO: 29358 - DNA, 41 bp, Emericella nidulans
gaattcactgcggccgccatgtcgcccaggaggtcgtcgaa

SEQ ID NO: 29359 - DNA, 56 bp, Emericella nidulans
gttctcgagacgagcgatcgcacttggacactatgaatcctagaggacaggcgtta

SEQ ID NO: 29360 - DNA, 47 bp, Emericella nidulans
gaattcactgcggccgccatggcccatctacgaagatgagagccaag

SEQ ID NO: 29361 - DNA, 44 bp, Emericella nidulans
gttctcgagacgagcgatcgccgtttgcgaactttttggtttcg

SEQ ID NO: 29362 - DNA, 41 bp, Emericella nidulans
gaattcactgcggccgccatgatccacgccgaccctgatgg

SEQ ID NO: 29363 - DNA, 52 bp, Emericella nidulans
gttctcgagacgagcgatcgcagctcatttcatgccattctttactttgtca

SEQ ID NO: 29364 - DNA, 46 bp, Emericella nidulans
gaattcactgcggccgccatgctgcttgatcgtcggcgagaatatc

SEQ ID NO: 29365 - DNA, 46 bp, Emericella nidulans
gttctcgagacgagcgatcgcccgagcggatggactttattctgct

SEQ ID NO: 29366 - DNA, 56 bp, Emericella nidulans
gaattcactgcggccgccatgcaatcgtacttgacctacatcactaatacctgtca

SEQ ID NO: 29367 - DNA, 57 bp, Emericella nidulans
gttctcgagacgagcgatcgcagcctcttatctgtatttattatatggaggtactgc

SEQ ID NO: 29368 - DNA, 41 bp, Emericella nidulans
gaattcactgcggccgccatggcttggtcgcgaaggcgaga

SEQ ID NO: 29369 - DNA, 45 bp, Emericella nidulans
gttctcgagacgagcgatcgctgatacggtctgtttgcattttgg

SEQ ID NO: 29370 - DNA, 50 bp, Emericella nidulans
gaattcactgcggccgccatgctgatacaatcgcatacattggaaattcg

SEQ ID NO: 29371 - DNA, 41 bp, Emericella nidulans
gttctcgagacgagcgatcgccccttgtcgtcggcgtggat

SEQ ID NO: 29372 - DNA, 42 bp, Emericella nidulans
gaattcactgcggccgccatggcgcggaaagaccaggaagga

SEQ ID NO: 29373 - DNA, 48 bp, Emericella nidulans
gttctcgagacgagcgatcgctgttacaccacatccatgtttccataa

SEQ ID NO: 29374 - DNA, 49 bp, Emericella nidulans
gaattcactgcggccgccatggagaaactaaaagtctcatccccgctga

SEQ ID NO: 29375 - DNA, 43 bp, Emericella nidulans; identical to SEQ ID NO: 29339

SEQ ID NO: 29376 - DNA, 49 bp, Emericella nidulans
gaattcactgcggccgccatgcttcctaagctttctcggaacatactcg

SEQ ID NO: 29377 - DNA, 46 bp, Emericella nidulans
gttctcgagacgagcgatcgctcgataagatggacggctcgtattg

SEQ ID NO: 29378 - DNA, 53 bp, Emericella nidulans
gaattcactgcggccgccatggtatcatcaactgactgaacctagcatacatc

SEQ ID NO: 29379 - DNA, 41 bp, Emericella nidulans
gttctcgagacgagcgatcgcggcgtcaacgctccatgtgc

SEQ ID NO: 29380 - DNA, 41 bp, Emericella nidulans
gaattcactgcggccgccatgccagaccggcccgttcacat

SEQ ID NO: 29381 - DNA, 54 bp, Emericella nidulans
gttctcgagacgagcgatcgcgcagagacattgcatttgatttaattagacgac

SEQ ID NO: 29382 - DNA, 41 bp, Emericella nidulans
gaattcactgcggccgccatgcggggtacggaccacaggga

SEQ ID NO: 29383 - DNA, 55 bp, Emericella nidulans
gttctcgagacgagcgatcgcaggctgagctagacgcatacgtacatgcatttct

SEQ ID NO: 29384 - DNA, 45 bp, Emericella nidulans
gaattcactgcggccgccatgaacagacgaagacaccaatgacga

SEQ ID NO: 29385 - DNA, 48 bp, Emericella nidulans
gttctcgagacgagcgatcgctgcgatatatcagtgctaggtttcagc

SEQ ID NO: 29386 - DNA, 44 bp, Emericella nidulans
gaattcactgcggccgccatgcctcgtgcacaacgagaagctca

SEQ ID NO: 29387 - DNA, 45 bp, Emericella nidulans
gttctcgagacgagcgatcgctcagccaaacaacctagcgtaccg

SEQ ID NO: 29388 - DNA, 45 bp, Emericella nidulans
gaattcactgcggccgccatggcaatcctcgaagaagctggaagc

SEQ ID NO: 29389 - DNA, 51 bp, Emericella nidulans
gttctcgagacgagcgatcgcccttgtcgactgattgcttaggtatgaagg

SEQ ID NO: 29390 - DNA, 41 bp, Emericella nidulans
gaattcactgcggccgccatgaccggccttcttgccacgag

SEQ ID NO: 29391 - DNA, 57 bp, Emericella nidulans
gttctcgagacgagcgatcgcctttttattacatacactatcgatctgtcaaactga

SEQ ID NO: 29392 - DNA, 40 bp, Emericella nidulans
gaattcactgcggccgccatggaggagcggcgcgaagtga

SEQ ID NO: 29393 - DNA, 42 bp, Emericella nidulans
gttctcgagacgagcgatcgcgccgcagggcttcgtaactgc

SEQ ID NO: 29394 - DNA, 42 bp, Emericella nidulans
gaattcactgcggccgccatgtccaggtcggccgccttactc

SEQ ID NO: 29395 - DNA, 49 bp, Emericella nidulans
gttctcgagacgagcgatcgccatctcaccaagttcactcaatgtatgg

SEQ ID NO: 29396 - DNA, 42 bp, Emericella nidulans
gaattcactgcggccgccatgtccccaaggaagaccgcaaga

SEQ ID NO: 29397 - DNA, 45 bp, Emericella nidulans; identical to SEQ ID NO: 29281

SEQ ID NO: 29398 - DNA, 41 bp, Emericella nidulans; identical to SEQ ID NO: 29358

SEQ ID NO: 29399 - DNA, 47 bp, Emericella nidulans
gttctcgagacgagcgatcgctcaataggggaacgtatgattgcgta

SEQ ID NO: 29400 - DNA, 42 bp, Emericella nidulans
gaattcactgcggccgccatgtgttccgcgatcttttcacca

SEQ ID NO: 29401 - DNA, 41 bp, Emericella nidulans
gttctcgagacgagcgatcgctgttgccgggaccgtcgttt

SEQ ID NO: 29402 - DNA, 52 bp, Emericella nidulans
gaattcactgcggccgccatgcgcgatcaatcaactaataaccataaaatca

SEQ ID NO: 29403 - DNA, 49 bp, Emericella nidulans
gttctcgagacgagcgatcgcatgaccgttgaattatttcagttctgct

SEQ ID NO: 29404 - DNA, 43 bp, Emericella nidulans
gaattcactgcggccgccatgcagccgtgcgaacaaataccca

SEQ ID NO: 29405 - DNA, 40 bp, Emericella nidulans
gttctcgagacgagcgatcgccgcccggcctcattccaac

SEQ ID NO: 29406 - DNA, 43 bp, Emericella nidulans; identical to SEQ ID NO: 29404

SEQ ID NO: 29407 - DNA, 40 bp, Emericella nidulans; identical to SEQ ID NO: 29405

SEQ ID NO: 29408 - DNA, 41 bp, Emericella nidulans
gaattcactgcggccgccatgccagtcgctcgccatcctga

SEQ ID NO: 29409 - DNA, 53 bp, Emericella nidulans
gttctcgagacgagcgatcgctctatggcacattctaggaaccatctaaatcc

SEQ ID NO: 29410 - DNA, 54 bp, Emericella nidulans
gaattcactgcggccgccatgtgactctattgaactctcactcgaatcagtcaa

SEQ ID NO: 29411 - DNA, 53 bp, Emericella nidulans
gttctcgagacgagcgatcgcaaaaatatcattgtaaatgccagaatggttcc

SEQ ID NO: 29412 - DNA, 45 bp, Emericella nidulans
gaattcactgcggccgccatgtcggcccaaagcttttagaatccc

SEQ ID NO: 29413 - DNA, 51 bp, Emericella nidulans
gttctcgagacgagcgatcgccctgtatgccatgctagttcctatctaaaa

SEQ ID NO: 29414 - DNA, 41 bp, Emericella nidulans
gaattcactgcggccgccatgcaccgtcgcgatggctcaag

SEQ ID NO: 29415 - DNA, 41 bp, Emericella nidulans
gttctcgagacgagcgatcgcagcttcctggcgcgcttgtc

SEQ ID NO: 29416 - DNA, 42 bp, Emericella nidulans
gaattcactgcggccgccatgccaaaatgggtcgcgtcagga

SEQ ID NO: 29417 - DNA, 44 bp, Emericella nidulans
gttctcgagacgagcgatcgccacgaccggacagtcacagacca

SEQ ID NO: 29418 - DNA, 45 bp, Emericella nidulans
gaattcactgcggccgccatgcaccggctacctcatcatcttgaa

SEQ ID NO: 29419 - DNA, 46 bp, Emericella nidulans
gttctcgagacgagcgatcgccgcggtgtatgaacgtaatcgacca

SEQ ID NO: 29420 - DNA, 44 bp, Emericella nidulans
gaattcactgcggccgccatgccgtcacaatgtccaacgttttc

SEQ ID NO: 29421 - DNA, 41 bp, Emericella nidulans
gttctcgagacgagcgatcgctaccggcccgcagaagctca

SEQ ID NO: 29422 - DNA, 44 bp, Emericella nidulans; identical to SEQ ID NO: 29420

SEQ ID NO: 29423 - DNA, 41 bp, Emericella nidulans; identical to SEQ ID NO: 29421

SEQ ID NO: 29424 - DNA, 44 bp, Emericella nidulans; identical to SEQ ID NO: 29420

SEQ ID NO: 29425 - DNA, 41 bp, Emericella nidulans; identical to SEQ ID NO: 29421

SEQ ID NO: 29426 - DNA, 47 bp, Emericella nidulans
gaattcactgcggccgccatgtgttgtcgacgacctgatcacttcaa

SEQ ID NO: 29427 - DNA, 51 bp, Emericella nidulans
gttctcgagacgagcgatcgccatactccttctgttcttgttcagagatgc

SEQ ID NO: 29428 - DNA, 43 bp, Emericella nidulans
gaattcactgcggccgccatgtggagagcgacaatgccaacca

SEQ ID NO: 29429 - DNA, 54 bp, Emericella nidulans
gttctcgagacgagcgatcgctatggataatgtaagatcgcagaaatccagggt

SEQ ID NO: 29430 - DNA, 41 bp, Emericella nidulans
gaattcactgcggccgccatgcagccgccctggctgatttc

SEQ ID NO: 29431 - DNA, 42 bp, Emericella nidulans
gttctcgagacgagcgatcgccctcgcgacaaagcagcgtgt

SEQ ID NO: 29432 - DNA, 41 bp, Emericella nidulans
gaattcactgcggccgccatggccgctgttgatggcactcg

SEQ ID NO: 29433 - DNA, 57 bp, Emericella nidulans
gttctcgagacgagcgatcgctataagtaatgaatttcatgatcttccggctgccta

SEQ ID NO: 29434 - DNA, 41 bp, Emericella nidulans; identical to SEQ ID NO: 29430

SEQ ID NO: 29435 - DNA, 42 bp, Emericella nidulans; identical to SEQ ID NO: 29431

SEQ ID NO: 29436 - DNA, 45 bp, Emericella nidulans
gaattcactgcggccgccatgcaagcacagtcaacatggccaaca

SEQ ID NO: 29437 - DNA, 43 bp, Emericella nidulans
gttctcgagacgagcgatcgcgcgcttagcagccttctcctga

SEQ ID NO: 29438 - DNA, 41 bp, Emericella nidulans
gaattcactgcggccgccatgtccaggccgctcacatcctg

SEQ ID NO: 29439 - DNA, 53 bp, Emericella nidulans
gttctcgagacgagcgatcgcattccgtaactcgtatcttctaaaacaaagca

SEQ ID NO: 29440 - DNA, 42 bp, Emericella nidulans
gaattcactgcggccgccatgcaacagcccgctcctgagcaa

SEQ ID NO: 29441 - DNA, 43 bp, Emericella nidulans
gttctcgagacgagcgatcgcggaaaccgaaccgaggaagtga

SEQ ID NO: 29442 - DNA, 41 bp, Emericella nidulans
gaattcactgcggccgccatgacgaggcgaggggaccctga

SEQ ID NO: 29443 - DNA, 48 bp, Emericella nidulans
gttctcgagacgagcgatcgccttaacattggtagttgtccgctttgg

SEQ ID NO: 29444 - DNA, 41 bp, Emericella nidulans
gaattcactgcggccgccatgtgcgcgaagaaagcctgctg

SEQ ID NO: 29445 - DNA, 40 bp, Emericella nidulans
gttctcgagacgagcgatcgcagtcggagctgcgacatgc

SEQ ID NO: 29446 - DNA, 42 bp, Emericella nidulans
gaattcactgcggccgccatgtcgcttgccctgctaccctca

SEQ ID NO: 29447 - DNA, 53 bp, Emericella nidulans
gttctcgagacgagcgatcgcaacaaaacaaaaacaaagagaaggtaaagaca

SEQ ID NO: 29448 - DNA, 41 bp, Emericella nidulans
gaattcactgcggccgccatgccaggctgcaacgccatcct

SEQ ID NO: 29449 - DNA, 50 bp, Emericella nidulans
gttctcgagacgagcgatcgctattgcgaacactctgtatttcgaacaat

SEQ ID NO: 29450 - DNA, 43 bp, Emericella nidulans
gaattcactgcggccgccatgtcgacggattcatgctgcttgc

SEQ ID NO: 29451 - DNA, 55 bp, Emericella nidulans
gttctcgagacgagcgatcgcaggagggaagacaatgatattataaggatgtaag

SEQ ID NO: 29452 - DNA, 41 bp, Emericella nidulans
gaattcactgcggccgccatgggagcggctcctgaccaacc

SEQ ID NO: 29453 - DNA, 43 bp, Emericella nidulans
gttctcgagacgagcgatcgccgatcaccggctcatggaaagg

SEQ ID NO: 29454 - DNA, 40 bp, Emericella nidulans
gaattcactgcggccgccatgaagtccgcgccgtcgctct

SEQ ID NO: 29455 - DNA, 54 bp, Emericella nidulans
gttctcgagacgagcgatcgccaacgtgaacgaatgaataattaggtatgtaga

SEQ ID NO: 29456 - DNA, 41 bp, Emericella nidulans
gaattcactgcggccgccatgtggttcccgccgcagagaag

SEQ ID NO: 29457 - DNA, 52 bp, Emericella nidulans
gttctcgagacgagcgatcgccgcagaacctatgctaatcatatggagctaa

SEQ ID NO: 29458 - DNA, 46 bp, Emericella nidulans
gaattcactgcggccgccatgcgagtcttcaaggaggggatgatac

SEQ ID NO: 29459 - DNA, 50 bp, Emericella nidulans
gttctcgagacgagcgatcgcaatggacaatgggaatattattgcagctt

SEQ ID NO: 29460 - DNA, 44 bp, Emericella nidulans
gaattcactgcggccgccatggctcagcaagcacaacgtcacca

SEQ ID NO: 29461 - DNA, 41 bp, Emericella nidulans
gttctcgagacgagcgatcgcggcattctggaagcgggagg

SEQ ID NO: 29462 - DNA, 43 bp, Emericella nidulans
gaattcactgcggccgccatgtctggatggtcttctcggcaca

SEQ ID NO: 29463 - DNA, 41 bp, Emericella nidulans
gttctcgagacgagcgatcgctcccgcaaagcctgggtgac

SEQ ID NO: 29464 - DNA, 51 bp, Emericella nidulans
gaattcactgcggccgccatgaccaataaccaaatttatgtacaacggtgc

SEQ ID NO: 29465 - DNA, 53 bp, Emericella nidulans
gttctcgagacgagcgatcgcgaaatgatctagataagggctgtgtccttaca

SEQ ID NO: 29466 - DNA, 52 bp, Emericella nidulans
gaattcactgcggccgccatgtttacttgaacctcaaaatttccagcgtatt

SEQ ID NO: 29467 - DNA, 42 bp, Emericella nidulans
gttctcgagacgagcgatcgcgccgataacgacgcgggtgta

SEQ ID NO: 29468 - DNA, 42 bp, Emericella nidulans
gaattcactgcggccgccatggctccacgtttggcgggatct

SEQ ID NO: 29469 - DNA, 57 bp, Emericella nidulans
gttctcgagacgagcgatcgcaataacgatcttcctactacatagtttgtttcactg

SEQ ID NO: 29470 - DNA, 42 bp, Emericella nidulans
gaattcactgcggccgccatggccctttgaacacgccgcaat

SEQ ID NO: 29471 - DNA, 51 bp, Emericella nidulans
gttctcgagacgagcgatcgctttgaaactataatgaaggcgatctctgtt

SEQ ID NO: 29472 - DNA, 44 bp, Emericella nidulans
gaattcactgcggccgccatgtgcatgtgggcaagtaagcacga

SEQ ID NO: 29473 - DNA, 46 bp, Emericella nidulans
gttctcgagacgagcgatcgcatttcatcacatgtgccgaagaaga

SEQ ID NO: 29474 - DNA, 49 bp, Emericella nidulans
gaattcactgcggccgccatgaaatccttgattaatggagcagcatcag

SEQ ID NO: 29475 - DNA, 53 bp, Emericella nidulans
gttctcgagacgagcgatcgctgtcttctattttggagttggattgtctatgg

SEQ ID NO: 29476 - DNA, 42 bp, Emericella nidulans
gaattcactgcggccgccatgccatccctcggcttctgaccc

SEQ ID NO: 29477 - DNA, 43 bp, Emericella nidulans
gttctcgagacgagcgatcgctgtgatccagcttcgcctgtcg

SEQ ID NO: 29478 - DNA, 42 bp, Emericella nidulans
gaattcactgcggccgccatgtcctcagttgccgggatcgaa

SEQ ID NO: 29479 - DNA, 48 bp, Emericella nidulans
gttctcgagacgagcgatcgcttgacaaatgagctgggactctttaca

SEQ ID NO: 29480 - DNA, 42 bp, Emericella nidulans
gaattcactgcggccgccatggcagccctgaggcaacaatgg

SEQ ID NO: 29481 - DNA, 49 bp, Emericella nidulans
gttctcgagacgagcgatcgccagtgattttccaaacaagaagacatcg

SEQ ID NO: 29482 - DNA, 55 bp, Emericella nidulans
gaattcactgcggccgccatgtttttgattatattctctcataatcacggccaat

SEQ ID NO: 29483 - DNA, 57 bp, Emericella nidulans
gttctcgagacgagcgatcgcgaatagatgaacggatatttgatcttattgtacacg

SEQ ID NO: 29484 - DNA, 44 bp, Emericella nidulans
gaattcactgcggccgccatgcggtctccaatccaacaccgaag

SEQ ID NO: 29485 - DNA, 49 bp, Emericella nidulans
gttctcgagacgagcgatcgcccgtagagatgcttgtgcagattagacg

SEQ ID NO: 29486 - DNA, 41 bp, Emericella nidulans
gaattcactgcggccgccatggctgcgtcgcggtcttctca

SEQ ID NO: 29487 - DNA, 41 bp, Emericella nidulans
gttctcgagacgagcgatcgcagcccgctgggacagggaag

SEQ ID NO: 29488 - DNA, 41 bp, Emericella nidulans
gaattcactgcggccgccatggcctacgccgctgtgcaagg

SEQ ID NO: 29489 - DNA, 46 bp, Emericella nidulans
gttctcgagacgagcgatcgcttataagcattggaaccccgcatca

SEQ ID NO: 29490 - DNA, 41 bp, Emericella nidulans
gaattcactgcggccgccatgccgatagcccagcccaacga

SEQ ID NO: 29491 - DNA, 42 bp, Emericella nidulans
gttctcgagacgagcgatcgccagcccgtgacggtgactcat

SEQ ID NO: 29492 - DNA, 43 bp, Emericella nidulans
gaattcactgcggccgccatgggctctgcaaaaatggccgtca

SEQ ID NO: 29493 - DNA, 48 bp, Emericella nidulans
gttctcgagacgagcgatcgcgatctcattgtactcccacgccattca

SEQ ID NO: 29494 - DNA, 44 bp, Emericella nidulans
gaattcactgcggccgccatgtcccgtcttttgagctgtcaacg

SEQ ID NO: 29495 - DNA, 42 bp, Emericella nidulans
gttctcgagacgagcgatcgcgagccgacgcaagcataacaa

SEQ ID NO: 29496 - DNA, 41 bp, Emericella nidulans
gaattcactgcggccgccatgtgccgtgctcatggcatctt

SEQ ID NO: 29497 - DNA, 42 bp, Emericella nidulans
gttctcgagacgagcgatcgcgcccttttggttcgggacctg

SEQ ID NO: 29498 - DNA, 41 bp, Emericella nidulans
gaattcactgcggccgccatgccctgcttcggcagcctctg

SEQ ID NO: 29499 - DNA, 48 bp, Emericella nidulans
gttctcgagacgagcgatcgcatagtggacgatggcaagaatagaacc

SEQ ID NO: 29500 - DNA, 45 bp, Emericella nidulans
gaattcactgcggccgccatggcgcgaatatgaacgtgaacgaca

SEQ ID NO: 29501 - DNA, 47 bp, Emericella nidulans
gttctcgagacgagcgatcgcgcagtaagctttgtgctctcaaacaa

SEQ ID NO: 29502 - DNA, 51 bp, Emericella nidulans
gaattcactgcggccgccatgctgacctgacctggctcttatttatgtatc

SEQ ID NO: 29503 - DNA, 57 bp, Emericella nidulans; identical to SEQ ID NO: 29263

SEQ ID NO: 29504 - DNA, 51 bp, Emericella nidulans; identical to SEQ ID NO: 29502

SEQ ID NO: 29505 - DNA, 57 bp, Emericella nidulans; identical to SEQ ID NO: 29263

SEQ ID NO: 29506 - DNA, 51 bp, Emericella nidulans
gaattcactgcggccgccatgtaatctgacctgacctggctcttatttatg

SEQ ID NO: 29507 - DNA, 57 bp, Emericella nidulans; identical to SEQ ID NO: 29263

SEQ ID NO: 29508 - DNA, 50 bp, Emericella nidulans
gaattcactgcggccgccatgtctaatctgacctgacctggctcttattt

SEQ ID NO: 29509 - DNA, 57 bp, Emericella nidulans; identical to SEQ ID NO: 29263

SEQ ID NO: 29510 - DNA, 41 bp, Emericella nidulans
gaattcactgcggccgccatgcgcgcctcaaaggctcgatt

SEQ ID NO: 29511 - DNA, 56 bp, Emericella nidulans
gttctcgagacgagcgatcgcaatgtgaacgatgtacataatatctagtggcgatg

SEQ ID NO: 29512 - DNA, 41 bp, Emericella nidulans
gaattcactgcggccgccatgtggcatccagcctcatctgc

SEQ ID NO: 29513 - DNA, 55 bp, Emericella nidulans
gttctcgagacgagcgatcgctagtatacgctttgcaactcttccatttttatga

SEQ ID NO: 29514 - DNA, 42 bp, Emericella nidulans
gaattcactgcggccgccatgcgagcgcctgaatacggagca

SEQ ID NO: 29515 - DNA, 41 bp, Emericella nidulans
gttctcgagacgagcgatcgctcggtccgccgacggtattc

SEQ ID NO: 29516 - DNA, 42 bp, Emericella nidulans
gaattcactgcggccgccatgcgcgagaatgccgacatgacc

SEQ ID NO: 29517 - DNA, 42 bp, Emericella nidulans
gttctcgagacgagcgatcgctgcgcctctttgatgccccta

SEQ ID NO: 29518 - DNA, 53 bp, Emericella nidulans
gaattcactgcggccgccatgccatctcttatttgcatattttgagaatggta

SEQ ID NO: 29519 - DNA, 48 bp, Emericella nidulans
gttctcgagacgagcgatcgcactttggcgaccgctactatactctgt

SEQ ID NO: 29520 - DNA, 44 bp, Emericella nidulans
gaattcactgcggccgccatgtcgctatcaggggcgtctctcaa

SEQ ID NO: 29521 - DNA, 52 bp, Emericella nidulans
gttctcgagacgagcgatcgcaaaatgtcgcatgctaaggagttatgactat

SEQ ID NO: 29522 - DNA, 41 bp, Emericella nidulans
gaattcactgcggccgccatgatcgccctcgcaggcaacaa

SEQ ID NO: 29523 - DNA, 57 bp, Emericella nidulans
gttctcgagacgagcgatcgcaagattcagcagatattatatggtcatcacacactg

SEQ ID NO: 29524 - DNA, 44 bp, Emericella nidulans
gaattcactgcggccgccatgcgaaggccgtctcaagtccatca

SEQ ID NO: 29525 - DNA, 46 bp, Emericella nidulans
gttctcgagacgagcgatcgcgaggcgttctggaaaagggttagtt

SEQ ID NO: 29526 - DNA, 46 bp, Emericella nidulans
gaattcactgcggccgccatgacctccaagtgctccctaaaatcct

SEQ ID NO: 29527 - DNA, 57 bp, Emericella nidulans
gttctcgagacgagcgatcgctagagagtttctagaaataatgatcaaatcctacca

SEQ ID NO: 29528 - DNA, 49 bp, Emericella nidulans
gaattcactgcggccgccatggatcttgggtccgctttagaagaagtcg

SEQ ID NO: 29529 - DNA, 46 bp, Emericella nidulans
gttctcgagacgagcgatcgctgcaacttgcataatgtcgtcactc

SEQ ID NO: 29530 - DNA, 44 bp, Emericella nidulans
gaattcactgcggccgccatgcgcaggtgcctggtactgtttgc

SEQ ID NO: 29531 - DNA, 45 bp, Emericella nidulans
gttctcgagacgagcgatcgcttagcccaaccatgcaatctttcg

SEQ ID NO: 29532 - DNA, 42 bp, Emericella nidulans
gaattcactgcggccgccatgtggagtcgggcatcgatgaga

SEQ ID NO: 29533 - DNA, 53 bp, Emericella nidulans
gttctcgagacgagcgatcgcttttgactcttttatgcttgcttgtttacttc

SEQ ID NO: 29534 - DNA, 42 bp, Emericella nidulans
gaattcactgcggccgccatgtcgataccgcctgggaccaca

SEQ ID NO: 29535 - DNA, 52 bp, Emericella nidulans
gttctcgagacgagcgatcgctgagatgatttcacatatttcgattctcgtg

SEQ ID NO: 29536 - DNA, 41 bp, Emericella nidulans
gaattcactgcggccgccatgcgggcgagtgctcaaggagg

SEQ ID NO: 29537 - DNA, 52 bp, Emericella nidulans
gttctcgagacgagcgatcgccaagcaatattctcaacactcgttcattaaa

SEQ ID NO: 29538 - DNA, 50 bp, Emericella nidulans
gaattcactgcggccgccatgcacagtcctttgacaaccacattcttttg

SEQ ID NO: 29539 - DNA, 56 bp, Emericella nidulans
gttctcgagacgagcgatcgcgtgtaaagtggtgtatttttcaatctatcccaacc

SEQ ID NO: 29540 - DNA, 50 bp, Emericella nidulans
gaattcactgcggccgccatgcctgttggactgagtaggatggctattcg

SEQ ID NO: 29541 - DNA, 45 bp, Emericella nidulans
gttctcgagacgagcgatcgcagcaacttggcagatgaatgatga

SEQ ID NO: 29542 - DNA, 48 bp, Emericella nidulans
gaattcactgcggccgccatgccctccaaaactgtcctgtactcgttg

SEQ ID NO: 29543 - DNA, 46 bp, Emericella nidulans
gttctcgagacgagcgatcgccgacggataaggaagcgaatcttga

SEQ ID NO: 29544 - DNA, 50 bp, Emericella nidulans; identical to SEQ ID NO: 29538

SEQ ID NO: 29545 - DNA, 57 bp, Emericella nidulans
gttctcgagacgagcgatcgcaggtagtgtaaagtggtgtatttttcaatctatccc

SEQ ID NO: 29546 - DNA, 51 bp, Emericella nidulans
gaattcactgcggccgccatgaagaatatgtcctttctgcaccaattttca

SEQ ID NO: 29547 - DNA, 45 bp, Emericella nidulans
gttctcgagacgagcgatcgcgggaagtactcctggcaaggggag

SEQ ID NO: 29548 - DNA, 42 bp, Emericella nidulans
gaattcactgcggccgccatgccactttcctcctgcccgtga

SEQ ID NO: 29549 - DNA, 55 bp, Emericella nidulans
gttctcgagacgagcgatcgctgggttaatgaacgtgatataatcagtgatagaa

SEQ ID NO: 29550 - DNA, 42 bp, Emericella nidulans
gaattcactgcggccgccatgcgctttgggtctccgctcctg

SEQ ID NO: 29551 - DNA, 43 bp, Emericella nidulans
gttctcgagacgagcgatcgcaaggagcgcaaacagttggatg

SEQ ID NO: 29552 - DNA, 41 bp, Emericella nidulans
gaattcactgcggccgccatgcgacgacaacaccacgaccc

SEQ ID NO: 29553 - DNA, 53 bp, Emericella nidulans
gttctcgagacgagcgatcgcagagaatcaagataagatcagattcagcagga

SEQ ID NO: 29554 - DNA, 49 bp, Emericella nidulans
gaattcactgcggccgccatgagcagcacttctacaactagcggtgatt

SEQ ID NO: 29555 - DNA, 41 bp, Emericella nidulans
gttctcgagacgagcgatcgcccgcgtgccaattgaacgaa

SEQ ID NO: 29556 - DNA, 51 bp, Emericella nidulans
gaattcactgcggccgccatgaaagcacctttttgtaaatcagttctgaaa

SEQ ID NO: 29557 - DNA, 52 bp, Emericella nidulans
gttctcgagacgagcgatcgcctactagtactagccactggtgccataatcg

SEQ ID NO: 29558 - DNA, 48 bp, Emericella nidulans
gaattcactgcggccgccatgaagcttttcgcaggtggagttactagg

SEQ ID NO: 29559 - DNA, 42 bp, Emericella nidulans
gttctcgagacgagcgatcgcccagaaactccccgtccactc

SEQ ID NO: 29560 - DNA, 41 bp, Emericella nidulans
gaattcactgcggccgccatgcgttacccgcgctccagacg

SEQ ID NO: 29561 - DNA, 57 bp, Emericella nidulans
gttctcgagacgagcgatcgctgtaatagagtctacgaattcaacctataactgtgg

SEQ ID NO: 29562 - DNA, 53 bp, Emericella nidulans
gaattcactgcggccgccatgttccatctacagagtaccacaatctacaatca

SEQ ID NO: 29563 - DNA, 53 bp, Emericella nidulans
gttctcgagacgagcgatcgcgtagtcttcgtaatcctgctttcaaacggaga

SEQ ID NO: 29564 - DNA, 42 bp, Emericella nidulans
gaattcactgcggccgccatggacctggtacgcacgcgaagg

SEQ ID NO: 29565 - DNA, 52 bp, Emericella nidulans
gttctcgagacgagcgatcgcaaatgaagagactgcctaggatggaattagc

SEQ ID NO: 29566 - DNA, 41 bp, Emericella nidulans
gaattcactgcggccgccatgtctcgcccgtctccctctgc

SEQ ID NO: 29567 - DNA, 42 bp, Emericella nidulans
gttctcgagacgagcgatcgccgctcaacgcgaggatgcagt

SEQ ID NO: 29568 - DNA, 41 bp, Emericella nidulans
gaattcactgcggccgccatgtgccaatggcatctccgaaa

SEQ ID NO: 29569 - DNA, 40 bp, Emericella nidulans
gttctcgagacgagcgatcgcgcggcctccgctggtatcc

SEQ ID NO: 29570 - DNA, 49 bp, Emericella nidulans
gaattcactgcggccgccatgaaagaagagggctatgaatatgtgctga

SEQ ID NO: 29571 - DNA, 53 bp, Emericella nidulans
gttctcgagacgagcgatcgcgattttacaattgtttcattgactgcaactgg

SEQ ID NO: 29572 - DNA, 41 bp, Emericella nidulans
gaattcactgcggccgccatgccccgaatccgaatccatcg

SEQ ID NO: 29573 - DNA, 41 bp, Emericella nidulans
gttctcgagacgagcgatcgcagacctggcggcgtcgagaa

SEQ ID NO: 29574 - DNA, 43 bp, Emericella nidulans
gaattcactgcggccgccatgtcctgcacgagaagagccctga

SEQ ID NO: 29575 - DNA, 41 bp, Emericella nidulans
gttctcgagacgagcgatcgccggtcgccagccaaccatct

SEQ ID NO: 29576 - DNA, 56 bp, Emericella nidulans
gaattcactgcggccgccatgtctctgcggaatatattatcctatttttattcctt

SEQ ID NO: 29577 - DNA, 53 bp, Emericella nidulans
gttctcgagacgagcgatcgcaagtagcaactgtaattccagattcaagaaaa

SEQ ID NO: 29578 - DNA, 57 bp, Emericella nidulans
gaattcactgcggccgccatgaccgatattctcaacaatataacttctacccgcacc

SEQ ID NO: 29579 - DNA, 50 bp, Emericella nidulans
gttctcgagacgagcgatcgcgtatcatattcgatttctggtcgctttcg

SEQ ID NO: 29580 - DNA, 42 bp, Emericella nidulans
gaattcactgcggccgccatgcgctatgcccgcccaaagaac

SEQ ID NO: 29581 - DNA, 49 bp, Emericella nidulans
gttctcgagacgagcgatcgcgatggatccaacttcgattgtttggaga

SEQ ID NO: 29582 - DNA, 45 bp, Emericella nidulans
gaattcactgcggccgccatgcccgtatgaaggagcaccagaagc

SEQ ID NO: 29583 - DNA, 52 bp, Emericella nidulans
gttctcgagacgagcgatcgctgtagtgtattgggtttagaaaatgagaacg

SEQ ID NO: 29584 - DNA, 41 bp, Emericella nidulans
gaattcactgcggccgccatgagggcagcctcaccgggttc

SEQ ID NO: 29585 - DNA, 55 bp, Emericella nidulans
gttctcgagacgagcgatcgcgaaaaagaatacggcaaaaacaaataaacaatgc

SEQ ID NO: 29586 - DNA, 49 bp, Emericella nidulans
gaattcactgcggccgccatggataggtgtcaatcgtcatatggcatcc

SEQ ID NO: 29587 - DNA, 53 bp, Emericella nidulans
gttctcgagacgagcgatcgctccttatcttgcattgcttgacagagaagctc

SEQ ID NO: 29588 - DNA, 48 bp, Emericella nidulans
gaattcactgcggccgccatgcagagtgcttgaccttgagacacttcg

SEQ ID NO: 29589 - DNA, 47 bp, Emericella nidulans
gttctcgagacgagcgatcgcgggacctatgcaccgttcattcttcg

SEQ ID NO: 29590 - DNA, 41 bp, Emericella nidulans
gaattcactgcggccgccatgcgcggttggaagcttgggtg

SEQ ID NO: 29591 - DNA, 41 bp, Emericella nidulans
gttctcgagacgagcgatcgctgcggctccaagactcgtga

SEQ ID NO: 29592 - DNA, 41 bp, Emericella nidulans
gaattcactgcggccgccatgggctgcagcgaagccggtaa

SEQ ID NO: 29593 - DNA, 41 bp, Emericella nidulans
gttctcgagacgagcgatcgcatcgcacgccgcttctcagg

SEQ ID NO: 29594 - DNA, 55 bp, Emericella nidulans
gaattcactgcggccgccatgttatatatctatgagattctcaacgctgatggag

SEQ ID NO: 29595 - DNA, 39 bp, Emericella nidulans
gttctcgagacgagcgatcgcacccgccccgctgagctt

SEQ ID NO: 29596 - DNA, 41 bp, Emericella nidulans
gaattcactgcggccgccatgccctccccagcaccaacagc

SEQ ID NO: 29597 - DNA, 55 bp, Emericella nidulans
gttctcgagacgagcgatcgcgacgcatacgtacatgcatttctatatcctatcc

SEQ ID NO: 29598 - DNA, 41 bp, Emericella nidulans
gaattcactgcggccgccatgcctaaaacgcgccgccgact

SEQ ID NO: 29599 - DNA, 47 bp, Emericella nidulans
gttctcgagacgagcgatcgcgccatgtgaaattctctttgtgtcaa

SEQ ID NO: 29600 - DNA, 44 bp, Emericella nidulans
gaattcactgcggccgccatgccacgcaagcacggttacattca

SEQ ID NO: 29601 - DNA, 44 bp, Emericella nidulans
gttctcgagacgagcgatcgccggagcaacgggttgtttatctg

SEQ ID NO: 29602 - DNA, 46 bp, Emericella nidulans
gaattcactgcggccgccatgcaaagactaaatggggccacccaag

SEQ ID NO: 29603 - DNA, 50 bp, Emericella nidulans
gttctcgagacgagcgatcgctgaccaagatgcttgctatcaaaatcacc

SEQ ID NO: 29604 - DNA, 45 bp, Emericella nidulans
gaattcactgcggccgccatgtgctcccatgtactaccggaatgc

SEQ ID NO: 29605 - DNA, 57 bp, Emericella nidulans
gttctcgagacgagcgatcgcaactaaagagtactcgacggtgttagaaaaatagca

SEQ ID NO: 29606 - DNA, 41 bp, Emericella nidulans
gaattcactgcggccgccatgcgatccgagcgcaagtgacg

SEQ ID NO: 29607 - DNA, 43 bp, Emericella nidulans
gttctcgagacgagcgatcgccaccatttggctggcgtcagaa

SEQ ID NO: 29608 - DNA, 44 bp, Emericella nidulans
gaattcactgcggccgccatgaggccagcaaggctcctttcata

SEQ ID NO: 29609 - DNA, 41 bp, Emericella nidulans
gttctcgagacgagcgatcgcgtcggcccacccactcagga

SEQ ID NO: 29610 - DNA, 55 bp, Emericella nidulans
gaattcactgcggccgccatgaactatcctaaccttcaattggtaacagttcctc

SEQ ID NO: 29611 - DNA, 55 bp, Emericella nidulans
gttctcgagacgagcgatcgccggttgcattagttggattcaacttcttccgtct

SEQ ID NO: 29612 - DNA, 54 bp, Emericella nidulans
gaattcactgcggccgccatgaaaaactttgaaagaggttcttttggaagactg

SEQ ID NO: 29613 - DNA, 41 bp, Emericella nidulans
gttctcgagacgagcgatcgcccacaccggaggcccagaga

SEQ ID NO: 29614 - DNA, 43 bp, Emericella nidulans
gaattcactgcggccgccatgcgggaacggaatagtcggtgga

SEQ ID NO: 29615 - DNA, 42 bp, Emericella nidulans
gttctcgagacgagcgatcgcgcacgacccttgcgtttgttg

SEQ ID NO: 29616 - DNA, 46 bp, Emericella nidulans
gaattcactgcggccgccatgccagaaccacgtcacatacctaccg

SEQ ID NO: 29617 - DNA, 41 bp, Emericella nidulans
gttctcgagacgagcgatcgcgcaacgcgcactaggattgc

SEQ ID NO: 29618 - DNA, 43 bp, Emericella nidulans
gaattcactgcggccgccatgggtgcggtggtaccttccgtct

SEQ ID NO: 29619 - DNA, 43 bp, Emericella nidulans
gttctcgagacgagcgatcgcgcacgcatcagatcgtcgtcgt

SEQ ID NO: 29620 - DNA, 41 bp, Emericella nidulans
gaattcactgcggccgccatgtcgtccgacccgatcttcca

SEQ ID NO: 29621 - DNA, 48 bp, Emericella nidulans
gttctcgagacgagcgatcgctgtacctacaacgtacaggctctcaca

SEQ ID NO: 29622 - DNA, 41 bp, Emericella nidulans
gaattcactgcggccgccatgcaacctcccgctcgccctct

SEQ ID NO: 29623 - DNA, 50 bp, Emericella nidulans
gttctcgagacgagcgatcgccggatagggacctatattttcttcctcgt

SEQ ID NO: 29624 - DNA, 41 bp, Emericella nidulans
gaattcactgcggccgccatgaatcgggccacccagcacaa

SEQ ID NO: 29625 - DNA, 49 bp, Emericella nidulans
gttctcgagacgagcgatcgcgagaaataaagacttgaaggagcgaggc

SEQ ID NO: 29626 - DNA, 42 bp, Emericella nidulans
gaattcactgcggccgccatgtcggagcccagtctgctctgg

SEQ ID NO: 29627 - DNA, 49 bp, Emericella nidulans
gttctcgagacgagcgatcgccctgttgcacaagctaaatggtattttt

SEQ ID NO: 29628 - DNA, 50 bp, Emericella nidulans
gaattcactgcggccgccatgagcttcctctcacagtctgctttctcttg

SEQ ID NO: 29629 - DNA, 41 bp, Emericella nidulans
gttctcgagacgagcgatcgctaccgcgccccaactccgta

SEQ ID NO: 29630 - DNA, 50 bp, Emericella nidulans; identical to SEQ ID NO: 29628

SEQ ID NO: 29631 - DNA, 41 bp, Emericella nidulans; identical to SEQ ID NO: 29629

SEQ ID NO: 29632 - DNA, 50 bp, Emericella nidulans; identical to SEQ ID NO: 29628

SEQ ID NO: 29633 - DNA, 41 bp, Emericella nidulans; identical to SEQ ID NO: 29629

SEQ ID NO: 29634 - DNA, 47 bp, Emericella nidulans
gaattcactgcggccgccatggagggggacgtagaacaggctactca

SEQ ID NO: 29635 - DNA, 48 bp, Emericella nidulans
gttctcgagacgagcgatcgctatcttggcacgagtccaagctatttg

SEQ ID NO: 29636 - DNA, 44 bp, Emericella nidulans
gaattcactgcggccgccatgaaggctaagggtgaagctcaacg

SEQ ID NO: 29637 - DNA, 41 bp, Emericella nidulans; identical to SEQ ID NO: 29609

SEQ ID NO: 29638 - DNA, 45 bp, Emericella nidulans
gaattcactgcggccgccatgtggcttcaggaacgtcatcactcc

SEQ ID NO: 29639 - DNA, 48 bp, Emericella nidulans
gttctcgagacgagcgatcgcccgttcattcttcgtactttgtagcac

SEQ ID NO: 29640 - DNA, 52 bp, Emericella nidulans
gaattcactgcggccgccatgagattgagaagttgaaactggagattgaggc

SEQ ID NO: 29641 - DNA, 41 bp, Emericella nidulans
gttctcgagacgagcgatcgcggcgcgcaaagctagccaat

SEQ ID NO: 29642 - DNA, 45 bp, Emericella nidulans
gaattcactgcggccgccatgcctgcaccaacgcagctataatcg

SEQ ID NO: 29643 - DNA, 42 bp, Emericella nidulans
gttctcgagacgagcgatcgccggtcaggcattgcacggcta

SEQ ID NO: 29644 - DNA, 47 bp, Emericella nidulans
gaattcactgcggccgccatgtgtccgcattctacattgattgtcca

SEQ ID NO: 29645 - DNA, 48 bp, Emericella nidulans
gttctcgagacgagcgatcgcaggacctgccacttgtgacaatagctc

SEQ ID NO: 29646 - DNA, 41 bp, Emericella nidulans
gaattcactgcggccgccatgctggtgctgtccgccctgag

SEQ ID NO: 29647 - DNA, 55 bp, Emericella nidulans
gttctcgagacgagcgatcgctgatggtattctatttaagtcgttcgttatttca

SEQ ID NO: 29648 - DNA, 42 bp, Emericella nidulans
gaattcactgcggccgccatgtcgcgcgcattcaagatcctc

SEQ ID NO: 29649 - DNA, 46 bp, Emericella nidulans
gttctcgagacgagcgatcgctcagcaggacaagggtggattagac

SEQ ID NO: 29650 - DNA, 42 bp, Emericella nidulans
gaattcactgcggccgccatgggtcgctgccattcccaaagc

SEQ ID NO: 29651 - DNA, 41 bp, Emericella nidulans
gttctcgagacgagcgatcgcggcgtgctcgccgaatcagt

SEQ ID NO: 29652 - DNA, 54 bp, Emericella nidulans
gaattcactgcggccgccatgtgaaactcataacattctgacaaggtaaaaagc

SEQ ID NO: 29653 - DNA, 57 bp, Emericella nidulans
gttctcgagacgagcgatcgcgctttctgataaatgagtagtatgtagctatccctc

SEQ ID NO: 29654 - DNA, 45 bp, Emericella nidulans
gaattcactgcggccgccatgggccgacattttcgttagccatcc

SEQ ID NO: 29655 - DNA, 44 bp, Emericella nidulans
gttctcgagacgagcgatcgcgcggatagctggcctatcgctca

SEQ ID NO: 29656 - DNA, 41 bp, Emericella nidulans
gaattcactgcggccgccatggcgtgcagtcacccaacggt

SEQ ID NO: 29657 - DNA, 42 bp, Emericella nidulans
gttctcgagacgagcgatcgctccaacatccaatgcgcgtct

SEQ ID NO: 29658 - DNA, 50 bp, Emericella nidulans
gaattcactgcggccgccatggcctatactcacatacaacccgtcaataa

SEQ ID NO: 29659 - DNA, 46 bp, Emericella nidulans
gttctcgagacgagcgatcgcgctcccaagtgtccttgagctgctt

SEQ ID NO: 29660 - DNA, 42 bp, Emericella nidulans
gaattcactgcggccgccatgcgtcctcctgcgacgtaggct

SEQ ID NO: 29661 - DNA, 55 bp, Emericella nidulans
gttctcgagacgagcgatcgcagcaatatgaacagacaggacattacaagtatgc

SEQ ID NO: 29662 - DNA, 51 bp, Emericella nidulans
gaattcactgcggccgccatgaggattctaatccggcactctatcttcgtg

SEQ ID NO: 29663 - DNA, 57 bp, Emericella nidulans
gttctcgagacgagcgatcgctaaatgatttatcatttaagcaagtataatggttgg

SEQ ID NO: 29664 - DNA, 43 bp, Emericella nidulans
gaattcactgcggccgccatggccagtgcgagaacaccaacga

SEQ ID NO: 29665 - DNA, 49 bp, Emericella nidulans
gttctcgagacgagcgatcgctcaccgaatgcaaaagttttattttgtc

SEQ ID NO: 29666 - DNA, 46 bp, Emericella nidulans
gaattcactgcggccgccatgtctggttgagtgtacggctatcgaa

SEQ ID NO: 29667 - DNA, 57 bp, Emericella nidulans
gttctcgagacgagcgatcgcttaatttatattactcttatcttatgcagggcacag

SEQ ID NO: 29668 - DNA, 41 bp, Emericella nidulans
gaattcactgcggccgccatggcaccggtgtccaggcccta

SEQ ID NO: 29669 - DNA, 53 bp, Emericella nidulans
gttctcgagacgagcgatcgctaaacgggaaaaatcattgttattacgaagca

SEQ ID NO: 29670 - DNA, 41 bp, Emericella nidulans
gaattcactgcggccgccatgagaagaggcggcggcgaaag

SEQ ID NO: 29671 - DNA, 56 bp, Emericella nidulans
gttctcgagacgagcgatcgcgatcgtagcctgaaaccggcttgagctgaatataa

SEQ ID NO: 29672 - DNA, 44 bp, Emericella nidulans
gaattcactgcggccgccatgccagcttatggacccgcagctct

SEQ ID NO: 29673 - DNA, 50 bp, Emericella nidulans
gttctcgagacgagcgatcgcgactagatgcatgcttgcattaggatagg

SEQ ID NO: 29674 - DNA, 45 bp, Emericella nidulans
gaattcactgcggccgccatgtcccttacgacaattcctgggagc

SEQ ID NO: 29675 - DNA, 53 bp, Emericella nidulans
gttctcgagacgagcgatcgccattgatgcattgcataagacaagcacaacca

SEQ ID NO: 29676 - DNA, 57 bp, Emericella nidulans
gaattcactgcggccgccatggcttctgtcaaccagataaactaggcctaaggcaac

SEQ ID NO: 29677 - DNA, 47 bp, Emericella nidulans
gttctcgagacgagcgatcgcggaaaaattgccaattccaaaacaca

SEQ ID NO: 29678 - DNA, 43 bp, Emericella nidulans
gaattcactgcggccgccatggcccctcaaacttgccttggtg

SEQ ID NO: 29679 - DNA, 47 bp, Emericella nidulans
gttctcgagacgagcgatcgcgtagtccaaactccgctggaaagctg

SEQ ID NO: 29680 - DNA, 43 bp, Emericella nidulans
gaattcactgcggccgccatgtccgtgacgttgaagcgcaact

SEQ ID NO: 29681 - DNA, 41 bp, Emericella nidulans
gttctcgagacgagcgatcgcggatgccgtggctcccacct

SEQ ID NO: 29682 - DNA, 45 bp, Emericella nidulans
gaattcactgcggccgccatgcggcattgaacagcattaacagca

SEQ ID NO: 29683 - DNA, 57 bp, Emericella nidulans
gttctcgagacgagcgatcgcttatagtaaattgtcaacactaccaaaaagtcaagc

SEQ ID NO: 29684 - DNA, 41 bp, Emericella nidulans
gaattcactgcggccgccatggcgtccaccagcgctcacag

SEQ ID NO: 29685 - DNA, 57 bp, Emericella nidulans
gttctcgagacgagcgatcgcgataggaattatctaagactcaaactacaaccatgc

SEQ ID NO: 29686 - DNA, 53 bp, Emericella nidulans
gaattcactgcggccgccatgtcagacttaaaaccagaaaaccttctttacct

SEQ ID NO: 29687 - DNA, 52 bp, Emericella nidulans
gttctcgagacgagcgatcgcgtatgatgcaaatagcggacttgattatgga

SEQ ID NO: 29688 - DNA, 41 bp, Emericella nidulans; identical to SEQ ID NO: 29496

SEQ ID NO: 29689 - DNA, 43 bp, Emericella nidulans
gttctcgagacgagcgatcgcggccaggagaccgcgtctaaca

SEQ ID NO: 29690 - DNA, 43 bp, Emericella nidulans
gaattcactgcggccgccatgtgattccccctcctcctcgtca

SEQ ID NO: 29691 - DNA, 43 bp, Emericella nidulans
gttctcgagacgagcgatcgccgccgaaggaagtccaaaggtg

SEQ ID NO: 29692 - DNA, 41 bp, Emericella nidulans
gaattcactgcggccgccatgccccggcactttccatgaca

SEQ ID NO: 29693 - DNA, 41 bp, Emericella nidulans
gttctcgagacgagcgatcgcgacccccgctgcgtaccaaa

SEQ ID NO: 29694 - DNA, 45 bp, Emericella nidulans
gaattcactgcggccgccatggcagccagtacgtttaccccgtga

SEQ ID NO: 29695 - DNA, 49 bp, Emericella nidulans
gttctcgagacgagcgatcgcttacaattgtttcattgactgcaactgg

SEQ ID NO: 29696 - DNA, 47 bp, Emericella nidulans
gaattcactgcggccgccatgtcatatagtccatcggcgtaagtcca

SEQ ID NO: 29697 - DNA, 41 bp, Emericella nidulans
gttctcgagacgagcgatcgcgggatgggtgcggagtttgg

SEQ ID NO: 29698 - DNA, 42 bp, Emericella nidulans
gaattcactgcggccgccatgtgccttgttttggctccgtca

SEQ ID NO: 29699 - DNA, 56 bp, Emericella nidulans
gttctcgagacgagcgatcgcggactaagagaaatgactccgaaaattatccttgg

SEQ ID NO: 29700 - DNA, 41 bp, Emericella nidulans
gaattcactgcggccgccatgtcgccggcaatcctttcagc

SEQ ID NO: 29701 - DNA, 56 bp, Emericella nidulans
gttctcgagacgagcgatcgcttcctggtacatatttcagacgatatagttcactg

SEQ ID NO: 29702 - DNA, 43 bp, Emericella nidulans
gaattcactgcggccgccatgcgctgccaagcgcatcgatagt

SEQ ID NO: 29703 - DNA, 57 bp, Emericella nidulans
gttctcgagacgagcgatcgcctattgactatgaaaagactaaacactaggtgatcg

SEQ ID NO: 29704 - DNA, 42 bp, Emericella nidulans
gaattcactgcggccgccatgccgtcggccttaacacgaaca

SEQ ID NO: 29705 - DNA, 50 bp, Emericella nidulans
gttctcgagacgagcgatcgccgtagacattcagaactccaccacaaagg

SEQ ID NO: 29706 - DNA, 52 bp, Emericella nidulans
gaattcactgcggccgccatgggtcaactcttatctcattccatcatcttcg

SEQ ID NO: 29707 - DNA, 42 bp, Emericella nidulans
gttctcgagacgagcgatcgctggacggaggcagctttgtca

SEQ ID NO: 29708 - DNA, 40 bp, Emericella nidulans
gaattcactgcggccgccatgagccgcgcgcaaagaggac

SEQ ID NO: 29709 - DNA, 41 bp, Emericella nidulans
gttctcgagacgagcgatcgcgcaagaccggcccgggtatc

SEQ ID NO: 29710 - DNA, 41 bp, Emericella nidulans
gaattcactgcggccgccatgcccgctgcggatggaggatt

SEQ ID NO: 29711 - DNA, 42 bp, Emericella nidulans
gttctcgagacgagcgatcgccatcagcgccgacggtatgtg

SEQ ID NO: 29712 - DNA, 52 bp, Emericella nidulans
gaattcactgcggccgccatgtttttgactttattcgatctgtcctcacctg

SEQ ID NO: 29713 - DNA, 49 bp, Emericella nidulans
gttctcgagacgagcgatcgcagaatcttcactcgaactagggagttgc

SEQ ID NO: 29714 - DNA, 43 bp, Emericella nidulans
gaattcactgcggccgccatggcaaacaacacgcccaagaggg

SEQ ID NO: 29715 - DNA, 53 bp, Emericella nidulans
gttctcgagacgagcgatcgcaaaacaaccaactccattgattttctaatctc

SEQ ID NO: 29716 - DNA, 55 bp, Emericella nidulans
gaattcactgcggccgccatgtattacaaggaggaatagttggtggtaatcataa

SEQ ID NO: 29717 - DNA, 42 bp, Emericella nidulans
gttctcgagacgagcgatcgcgcttccatgtccgggaaccca

SEQ ID NO: 29718 - DNA, 42 bp, Emericella nidulans
gaattcactgcggccgccatgccccaatctcctgcccagcac

SEQ ID NO: 29719 - DNA, 57 bp, Emericella nidulans
gttctcgagacgagcgatcgctttatatatcgtttaggtacatatcagtcgcaggga

SEQ ID NO: 29720 - DNA, 43 bp, Emericella nidulans
gaattcactgcggccgccatggcgcctccttctgtcgcatttg

SEQ ID NO: 29721 - DNA, 49 bp, Emericella nidulans
gttctcgagacgagcgatcgccctgctcgttctcaacataaccttagag

SEQ ID NO: 29722 - DNA, 51 bp, Emericella nidulans
gaattcactgcggccgccatgcatgctaaaaatctggtctatggtatgcac

SEQ ID NO: 29723 - DNA, 52 bp, Emericella nidulans
gttctcgagacgagcgatcgcaagaagtcaaagagttcatattcatcaggga

SEQ ID NO: 29724 - DNA, 45 bp, Emericella nidulans
gaattcactgcggccgccatgggtggatactgggctaagcggaca

SEQ ID NO: 29725 - DNA, 46 bp, Emericella nidulans
gttctcgagacgagcgatcgcgccgctaaatacctgcgaggtaagc

SEQ ID NO: 29726 - DNA, 49 bp, Emericella nidulans
gaattcactgcggccgccatgaccgagtcactcagcctacttcgcctta

SEQ ID NO: 29727 - DNA, 46 bp, Emericella nidulans
gttctcgagacgagcgatcgctcgaaagagttcgtgttggtcgttc

SEQ ID NO: 29728 - DNA, 57 bp, Emericella nidulans
gaattcactgcggccgccatgagatatagagctgccgttctatattgccctggcttc

SEQ ID NO: 29729 - DNA, 48 bp, Emericella nidulans
gttctcgagacgagcgatcgcagtttgaggttgaggtcaacagactgg

SEQ ID NO: 29730 - DNA, 40 bp, Emericella nidulans
gaattcactgcggccgccatggggcaccggtagcgccagt

SEQ ID NO: 29731 - DNA, 48 bp, Emericella nidulans
gttctcgagacgagcgatcgcaaatgaaaatgaactcgattggagagg

SEQ ID NO: 29732 - DNA, 48 bp, Emericella nidulans
gaattcactgcggccgccatgtgctttaaaataccgccatacgaaacg

SEQ ID NO: 29733 - DNA, 50 bp, Emericella nidulans
gttctcgagacgagcgatcgctgttggaataatctgatattttggcgagt

SEQ ID NO: 29734 - DNA, 41 bp, Emericella nidulans
gaattcactgcggccgccatgcccccagaatgcggtcacct

SEQ ID NO: 29735 - DNA, 50 bp, Emericella nidulans
gttctcgagacgagcgatcgcatcatagtagcgagcctgacaagaaaagc

SEQ ID NO: 29736 - DNA, 47 bp, Emericella nidulans
gaattcactgcggccgccatgtctatcttctgtctccccgtgacaat

SEQ ID NO: 29737 - DNA, 46 bp, Emericella nidulans
gttctcgagacgagcgatcgcagaacggcaatgaatcttggctacg

SEQ ID NO: 29738 - DNA, 55 bp, Emericella nidulans
gaattcactgcggccgccatgtgttctagctttcaagctatacaaattcaactca

SEQ ID NO: 29739 - DNA, 45 bp, Emericella nidulans
gttctcgagacgagcgatcgcaatctcacccctcccatctaagca

SEQ ID NO: 29740 - DNA, 41 bp, Emericella nidulans
gaattcactgcggccgccatgcggttgatccccgtccgaca

SEQ ID NO: 29741 - DNA, 53 bp, Emericella nidulans
gttctcgagacgagcgatcgctaaaaatcgacgaccagattcatcattagctg

SEQ ID NO: 29742 - DNA, 41 bp, Emericella nidulans
gaattcactgcggccgccatgtcatccggcgacgctcgact

SEQ ID NO: 29743 - DNA, 53 bp, Emericella nidulans
gttctcgagacgagcgatcgcgaagctgatcgaatatcatattacgttgtgag

SEQ ID NO: 29744 - DNA, 45 bp, Emericella nidulans
gaattcactgcggccgccatgcagaggaaggctaccgaccggagt

SEQ ID NO: 29745 - DNA, 57 bp, Emericella nidulans
gttctcgagacgagcgatcgctatgtaccgttgtacagaaatgaataatagacagag

SEQ ID NO: 29746 - DNA, 42 bp, Emericella nidulans
gaattcactgcggccgccatgtggctcctgatgccgaactcc

SEQ ID NO: 29747 - DNA, 42 bp, Emericella nidulans
gttctcgagacgagcgatcgccatgggcgcaccattctttcg

SEQ ID NO: 29748 - DNA, 41 bp, Emericella nidulans
gaattcactgcggccgccatgtttcacccaccgctcaccca

SEQ ID NO: 29749 - DNA, 44 bp, Emericella nidulans
gttctcgagacgagcgatcgctggcattgaaatatggcccttga

SEQ ID NO: 29750 - DNA, 42 bp, Emericella nidulans
gaattcactgcggccgccatgccgcccgtctaggattcttcg

SEQ ID NO: 29751 - DNA, 43 bp, Emericella nidulans
gttctcgagacgagcgatcgccatgcccagtcctcgtgagacg

SEQ ID NO: 29752 - DNA, 42 bp, Emericella nidulans
gaattcactgcggccgccatgtgacgccggtattctctgtcg

SEQ ID NO: 29753 - DNA, 52 bp, Emericella nidulans
gttctcgagacgagcgatcgccaaagaaggttctgatataaagcggcgcaca

SEQ ID NO: 29754 - DNA, 56 bp, Emericella nidulans
gaattcactgcggccgccatgaacctatttagggaagaattcactctggatatact

SEQ ID NO: 29755 - DNA, 55 bp, Emericella nidulans
gttctcgagacgagcgatcgcttctaccctataggtttatttgatggacggcgta

SEQ ID NO: 29756 - DNA, 41 bp, Emericella nidulans
gaattcactgcggccgccatgcgacccgaacctctgggagc

SEQ ID NO: 29757 - DNA, 57 bp, Emericella nidulans
gttctcgagacgagcgatcgcgtctgttatgtggatatatgtattggttagttttgg

SEQ ID NO: 29758 - DNA, 41 bp, Emericella nidulans
gaattcactgcggccgccatggtccttggccacgaggtgcc

SEQ ID NO: 29759 - DNA, 52 bp, Emericella nidulans
gttctcgagacgagcgatcgcttgacagtcggcatgcttatattacatgagt

SEQ ID NO: 29760 - DNA, 41 bp, Emericella nidulans
gaattcactgcggccgccatgcgctattgcctcccgcaagc

SEQ ID NO: 29761 - DNA, 52 bp, Emericella nidulans
gttctcgagacgagcgatcgcgaacagatagatggtattcttttcgcagatg

SEQ ID NO: 29762 - DNA, 54 bp, Emericella nidulans
gaattcactgcggccgccatgcttgcagtacatttttatctttgaattgttcag

SEQ ID NO: 29763 - DNA, 41 bp, Emericella nidulans
gttctcgagacgagcgatcgcctcgcgccttggcatcctgt

SEQ ID NO: 29764 - DNA, 57 bp, Emericella nidulans
gaattcactgcggccgccatgactttcaattgatcttcttctactacctctcataca

SEQ ID NO: 29765 - DNA, 51 bp, Emericella nidulans
gttctcgagacgagcgatcgcagcacttcatgctatattcgtttcattgag

SEQ ID NO: 29766 - DNA, 48 bp, Emericella nidulans
gaattcactgcggccgccatgtttaatccgttctactgccttttcgag

SEQ ID NO: 29767 - DNA, 41 bp, Emericella nidulans
gttctcgagacgagcgatcgcgcctgcaccgtgacaggaga

SEQ ID NO: 29768 - DNA, 54 bp, Emericella nidulans
gaattcactgcggccgccatggagtatttaaccagttaatgatccaggtagacg

SEQ ID NO: 29769 - DNA, 55 bp, Emericella nidulans
gttctcgagacgagcgatcgcattccagaaagagatatgagattgaaagagttga

SEQ ID NO: 29770 - DNA, 42 bp, Emericella nidulans
gaattcactgcggccgccatgcccgggaacgttctccgttca

SEQ ID NO: 29771 - DNA, 49 bp, Emericella nidulans
gttctcgagacgagcgatcgccgaagatgagagaaggagaaagaaatgc

SEQ ID NO: 29772 - DNA, 41 bp, Emericella nidulans
gaattcactgcggccgccatgacaccctcccgcccggttac

SEQ ID NO: 29773 - DNA, 55 bp, Emericella nidulans
gttctcgagacgagcgatcgcactggtagaagtatctcttattcactccgctgct

SEQ ID NO: 29774 - DNA, 41 bp, Emericella nidulans
gaattcactgcggccgccatgtgcctccgacccgagcactt

SEQ ID NO: 29775 - DNA, 45 bp, Emericella nidulans
gttctcgagacgagcgatcgccacaacgtcaagaacattcgagga

SEQ ID NO: 29776 - DNA, 51 bp, Emericella nidulans
gaattcactgcggccgccatgttgttcgtttatttctgcttccttttgtcc

SEQ ID NO: 29777 - DNA, 45 bp, Emericella nidulans
gttctcgagacgagcgatcgccggcaaggaattgaaatggagtgg

SEQ ID NO: 29778 - DNA, 43 bp, Emericella nidulans
gaattcactgcggccgccatgaagctcaagaaaccacggcaca

SEQ ID NO: 29779 - DNA, 54 bp, Emericella nidulans
gttctcgagacgagcgatcgcagatgggaattttgttgtctactctaagtctga

SEQ ID NO: 29780 - DNA, 43 bp, Emericella nidulans
gaattcactgcggccgccatgtccgccctttttgattccccac

SEQ ID NO: 29781 - DNA, 41 bp, Emericella nidulans
gttctcgagacgagcgatcgccctcggcgattcgcaaatga

SEQ ID NO: 29782 - DNA, 42 bp, Emericella nidulans
gaattcactgcggccgccatgcggaaagcatgctgtggcaga

SEQ ID NO: 29783 - DNA, 47 bp, Emericella nidulans
gttctcgagacgagcgatcgctcctaccattctcctctgtcgggttc

SEQ ID NO: 29784 - DNA, 45 bp, Emericella nidulans
gaattcactgcggccgccatgtcagagccatttctcccgtcttcg

SEQ ID NO: 29785 - DNA, 52 bp, Emericella nidulans
gttctcgagacgagcgatcgcgccaaagaaaggagtattatttcgcccatgt

SEQ ID NO: 29786 - DNA, 50 bp, Emericella nidulans
gaattcactgcggccgccatgcgtcttggtggaattcctcatgacacata

SEQ ID NO: 29787 - DNA, 47 bp, Emericella nidulans
gttctcgagacgagcgatcgccgtgacgctgcaaatgtatatcactg

SEQ ID NO: 29788 - DNA, 42 bp, Emericella nidulans
gaattcactgcggccgccatgtcgcgcctagaccactcacca

SEQ ID NO: 29789 - DNA, 56 bp, Emericella nidulans
gttctcgagacgagcgatcgctcgaataacgtacaacacagagaaatagaacagga

SEQ ID NO: 29790 - DNA, 43 bp, Emericella nidulans
gaattcactgcggccgccatgcgacgaccctgcagcacttcaa

SEQ ID NO: 29791 - DNA, 52 bp, Emericella nidulans
gttctcgagacgagcgatcgcgagtcagtacgtctccattctgttttgatgc

SEQ ID NO: 29792 - DNA, 50 bp, Emericella nidulans
gaattcactgcggccgccatggaaaaatagacgaaaatatcgggatcgaa

SEQ ID NO: 29793 - DNA, 53 bp, Emericella nidulans
gttctcgagacgagcgatcgccacagtccatctgttattagctttttgctaca

SEQ ID NO: 29794 - DNA, 49 bp, Emericella nidulans
gaattcactgcggccgccatgatctattcgccgataagaaactctgcat

SEQ ID NO: 29795 - DNA, 43 bp, Emericella nidulans
gttctcgagacgagcgatcgctcacgcctccttgactccaaca

SEQ ID NO: 29796 - DNA, 44 bp, Emericella nidulans
gaattcactgcggccgccatggggtccaatcaaggagctcaagg

SEQ ID NO: 29797 - DNA, 52 bp, Emericella nidulans
gttctcgagacgagcgatcgcaaagtcgagaaatttgtattccgctgtctga

SEQ ID NO: 29798 - DNA, 42 bp, Emericella nidulans
gaattcactgcggccgccatgggctgaccgagtaggcgacga

SEQ ID NO: 29799 - DNA, 50 bp, Emericella nidulans
gttctcgagacgagcgatcgccaatttccagcaataatatcagcggcaac

SEQ ID NO: 29800 - DNA, 43 bp, Emericella nidulans
gaattcactgcggccgccatgcaaatggcgcgcctgtaacaca

SEQ ID NO: 29801 - DNA, 46 bp, Emericella nidulans
gttctcgagacgagcgatcgcaatacaccctgagcaatgcccgaag

SEQ ID NO: 29802 - DNA, 41 bp, Emericella nidulans
gaattcactgcggccgccatggggcaggcctaccgtcagca

SEQ ID NO: 29803 - DNA, 46 bp, Emericella nidulans
gttctcgagacgagcgatcgcgcaaagacagatcgagtcaacgaca

SEQ ID NO: 29804 - DNA, 41 bp, Emericella nidulans
gaattcactgcggccgccatggggtggtggacggtgccatt

SEQ ID NO: 29805 - DNA, 50 bp, Emericella nidulans
gttctcgagacgagcgatcgcacataagtcatcgccctgaatagctaaga

SEQ ID NO: 29806 - DNA, 42 bp, Emericella nidulans
gaattcactgcggccgccatgtgcttgcctcggctagggctc

SEQ ID NO: 29807 - DNA, 45 bp, Emericella nidulans
gttctcgagacgagcgatcgccgtcaaacgcgcttagttgattcg

SEQ ID NO: 29808 - DNA, 57 bp, Emericella nidulans
gaattcactgcggccgccatgcaacgtccatttctaagctacattcaaaatgctctc

SEQ ID NO: 29809 - DNA, 57 bp, Emericella nidulans
gttctcgagacgagcgatcgccctaattcatttctatattaatacatgtccatcctg

SEQ ID NO: 29810 - DNA, 41 bp, Emericella nidulans
gaattcactgcggccgccatgtcctcccatcccaacgtcca

SEQ ID NO: 29811 - DNA, 57 bp, Emericella nidulans; identical to SEQ ID NO: 29809

SEQ ID NO: 29812 - DNA, 57 bp, Emericella nidulans; identical to SEQ ID NO: 29808

SEQ ID NO: 29813 - DNA, 55 bp, Emericella nidulans
gttctcgagacgagcgatcgcggcatgattacaataagattcctaattcatttct

SEQ ID NO: 29814 - DNA, 49 bp, Emericella nidulans
gaattcactgcggccgccatgtgcagtggttttccgatatccatttgag

SEQ ID NO: 29815 - DNA, 57 bp, Emericella nidulans
gttctcgagacgagcgatcgctttatatagataatctattgctatgctggtctttgg

SEQ ID NO: 29816 - DNA, 41 bp, Emericella nidulans
gaattcactgcggccgccatggcggcactccgtccaggaga

SEQ ID NO: 29817 - DNA, 56 bp, Emericella nidulans
gttctcgagacgagcgatcgcataatatatggaaagtagttgaatgacaggtgctg

SEQ ID NO: 29818 - DNA, 46 bp, Emericella nidulans
gaattcactgcggccgccatggatccgaacagcttcatttttgtcg

SEQ ID NO: 29819 - DNA, 45 bp, Emericella nidulans
gttctcgagacgagcgatcgccaggccattgtagaggggtgaagc

SEQ ID NO: 29820 - DNA, 41 bp, Emericella nidulans
gaattcactgcggccgccatgtccaccgcgtcgacaacacc

SEQ ID NO: 29821 - DNA, 47 bp, Emericella nidulans
gttctcgagacgagcgatcgcgggtaatgagaaaagccatcgcatga

SEQ ID NO: 29822 - DNA, 41 bp, Emericella nidulans; identical to SEQ ID NO: 29820

SEQ ID NO: 29823 - DNA, 47 bp, Emericella nidulans; identical to SEQ ID NO: 29821

SEQ ID NO: 29824 - DNA, 41 bp, Emericella nidulans
gaattcactgcggccgccatgaacgccacggcatcgaagga

SEQ ID NO: 29825 - DNA, 57 bp, Emericella nidulans
gttctcgagacgagcgatcgcaattctaaatgcccttctaatgatattctaacaatc

SEQ ID NO: 29826 - DNA, 41 bp, Emericella nidulans
gaattcactgcggccgccatgcgctcatccgtgaggccaga

SEQ ID NO: 29827 - DNA, 55 bp, Emericella nidulans
gttctcgagacgagcgatcgctggagaggtattgagtctaatctttctcctgagc

SEQ ID NO: 29828 - DNA, 45 bp, Emericella nidulans
gaattcactgcggccgccatgggaaatcctgaattcaagcacagc

SEQ ID NO: 29829 - DNA, 55 bp, Emericella nidulans
gttctcgagacgagcgatcgcgtaagttgatacacatcgcattgtatgcggaagg

SEQ ID NO: 29830 - DNA, 41 bp, Emericella nidulans
gaattcactgcggccgccatggccgttcttgcagcggttcc

SEQ ID NO: 29831 - DNA, 43 bp, Emericella nidulans
gttctcgagacgagcgatcgcaccgtcccagaaacgccagaca

SEQ ID NO: 29832 - DNA, 41 bp, Emericella nidulans
gaattcactgcggccgccatgtgcccatcccaggtgccttt

SEQ ID NO: 29833 - DNA, 50 bp, Emericella nidulans
gttctcgagacgagcgatcgcattgtgaaacagtcaactcaattcaccca

SEQ ID NO: 29834 - DNA, 42 bp, Emericella nidulans
gaattcactgcggccgccatgcgcgtcttcaccgttccgaag

SEQ ID NO: 29835 - DNA, 47 bp, Emericella nidulans
gttctcgagacgagcgatcgcctatctcaggcgggtatcctttcaga

SEQ ID NO: 29836 - DNA, 43 bp, Emericella nidulans
gaattcactgcggccgccatgggaggccaactcactgcgcttc

SEQ ID NO: 29837 - DNA, 57 bp, Emericella nidulans
gttctcgagacgagcgatcgctaaacgaacgaatactatacattagtttcaggacga

SEQ ID NO: 29838 - DNA, 42 bp, Emericella nidulans
gaattcactgcggccgccatggcgcttgcgggaagttcaaca

SEQ ID NO: 29839 - DNA, 46 bp, Emericella nidulans
gttctcgagacgagcgatcgcaattgaatttggtaacgggacaagc

SEQ ID NO: 29840 - DNA, 45 bp, Emericella nidulans
gaattcactgcggccgccatgccctcgaccaaacttggtgggatt

SEQ ID NO: 29841 - DNA, 42 bp, Emericella nidulans
gttctcgagacgagcgatcgctccggtgggatgtcggaactg

SEQ ID NO: 29842 - DNA, 41 bp, Emericella nidulans
gaattcactgcggccgccatgtggagttgccggtccccttg

SEQ ID NO: 29843 - DNA, 57 bp, Emericella nidulans
gttctcgagacgagcgatcgcttattgctcggcgaagttgattcgactagtatatgt

SEQ ID NO: 29844 - DNA, 46 bp, Emericella nidulans
gaattcactgcggccgccatgccgcaatcaagtcgacgaagaaaca

SEQ ID NO: 29845 - DNA, 57 bp, Emericella nidulans
gttctcgagacgagcgatcgcaattcataatattttgactaaatcgactgccgtgct

SEQ ID NO: 29846 - DNA, 42 bp, Emericella nidulans
gaattcactgcggccgccatgcagcacggtacccgggcttta

SEQ ID NO: 29847 - DNA, 52 bp, Emericella nidulans
gttctcgagacgagcgatcgcatgattcaataaatcaattctaccgctatgg

SEQ ID NO: 29848 - DNA, 45 bp, Emericella nidulans
gaattcactgcggccgccatgtggcattgggcccaactaataacg

SEQ ID NO: 29849 - DNA, 46 bp, Emericella nidulans
gttctcgagacgagcgatcgcatgcatcgtttatgatgtggcattt

SEQ ID NO: 29850 - DNA, 47 bp, Emericella nidulans
gaattcactgcggccgccatggaaacctgtcgagcatggttgagttc

SEQ ID NO: 29851 - DNA, 56 bp, Emericella nidulans
gttctcgagacgagcgatcgcatactaatctcacgaacctatactcctctcaagac

SEQ ID NO: 29852 - DNA, 41 bp, Emericella nidulans
gaattcactgcggccgccatgtctcgaccagcgacgaccca

SEQ ID NO: 29853 - DNA, 49 bp, Emericella nidulans
gttctcgagacgagcgatcgcgtgtgcagggaatatttcaataaaaacg

SEQ ID NO: 29854 - DNA, 41 bp, Emericella nidulans
gaattcactgcggccgccatgagccaccgtgtcgcctctgg

SEQ ID NO: 29855 - DNA, 51 bp, Emericella nidulans
gttctcgagacgagcgatcgcacacgagtagctgtttgattaatggtccaa

SEQ ID NO: 29856 - DNA, 49 bp, Emericella nidulans
gaattcactgcggccgccatgaacaatcttcaagactgtcccctatcca

SEQ ID NO: 29857 - DNA, 57 bp, Emericella nidulans
gttctcgagacgagcgatcgcctatattgattaagtatccattaagatggctcaaga

SEQ ID NO: 29858 - DNA, 41 bp, Emericella nidulans
gaattcactgcggccgccatgcttcgttgcccacgcgacaa

SEQ ID NO: 29859 - DNA, 56 bp, Emericella nidulans
gttctcgagacgagcgatcgctacaagaaggtaattagacaattgcagaaagttgg

SEQ ID NO: 29860 - DNA, 44 bp, Emericella nidulans
gaattcactgcggccgccatgtccttcctcctgctgaacccctc

SEQ ID NO: 29861 - DNA, 50 bp, Emericella nidulans
gttctcgagacgagcgatcgcggcgtaagtccattttgtattccatagat

SEQ ID NO: 29862 - DNA, 41 bp, Emericella nidulans
gaattcactgcggccgccatgcgcctgcaggcgagctttct

SEQ ID NO: 29863 - DNA, 48 bp, Emericella nidulans
gttctcgagacgagcgatcgccgcctcgtttttggtgttttctaagga

SEQ ID NO: 29864 - DNA, 44 bp, Emericella nidulans
gaattcactgcggccgccatgcccgctcctacactttccgtacc

SEQ ID NO: 29865 - DNA, 41 bp, Emericella nidulans
gttctcgagacgagcgatcgcaggaatgaaccgcccttgct

SEQ ID NO: 29866 - DNA, 41 bp, Emericella nidulans
gaattcactgcggccgccatgttcgccggctgaatgacgag

SEQ ID NO: 29867 - DNA, 42 bp, Emericella nidulans
gttctcgagacgagcgatcgccacgcagggagaagcgcagtc

SEQ ID NO: 29868 - DNA, 44 bp, Emericella nidulans
gaattcactgcggccgccatgtctgcctggtgggatcattctcg

SEQ ID NO: 29869 - DNA, 57 bp, Emericella nidulans
gttctcgagacgagcgatcgcataatagattctggattgtttgtatgttaccgcttg

SEQ ID NO: 29870 - DNA, 52 bp, Emericella nidulans
gaattcactgcggccgccatgcacttctatattacatcacccacaggagctt

SEQ ID NO: 29871 - DNA, 54 bp, Emericella nidulans
gttctcgagacgagcgatcgcgccttttaactttgcatttagaaacgctagaac

SEQ ID NO: 29872 - DNA, 41 bp, Emericella nidulans
gaattcactgcggccgccatgggcccctcaggcctggacaa

SEQ ID NO: 29873 - DNA, 57 bp, Emericella nidulans
gttctcgagacgagcgatcgctcctattatacttttatctaaatccgtacatgcaga

SEQ ID NO: 29874 - DNA, 41 bp, Emericella nidulans
gaattcactgcggccgccatgtcccatccggcttgatcgtg

SEQ ID NO: 29875 - DNA, 49 bp, Emericella nidulans
gttctcgagacgagcgatcgcacaaccttgtacaagcgtcacattaggg

SEQ ID NO: 29876 - DNA, 41 bp, Emericella nidulans
gaattcactgcggccgccatggacccgctgaccaaggccac

SEQ ID NO: 29877 - DNA, 44 bp, Emericella nidulans
gttctcgagacgagcgatcgcctcgcttgaagaggactgttgga

SEQ ID NO: 29878 - DNA, 43 bp, Emericella nidulans
gaattcactgcggccgccatgtggccctctccctcttcctgct

SEQ ID NO: 29879 - DNA, 41 bp, Emericella nidulans
gttctcgagacgagcgatcgcggtgccgaactcgctgagcc

SEQ ID NO: 29880 - DNA, 48 bp, Emericella nidulans
gaattcactgcggccgccatgttttcttgcggttcatcgaaagtcagg

SEQ ID NO: 29881 - DNA, 45 bp, Emericella nidulans
gttctcgagacgagcgatcgctggtatgaacgtggattgcaggct

SEQ ID NO: 29882 - DNA, 48 bp, Emericella nidulans
gaattcactgcggccgccatgtctcaacctcatccagttcttctcacc

SEQ ID NO: 29883 - DNA, 49 bp, Emericella nidulans
gttctcgagacgagcgatcgccggtttaggaagacattgattctgctgt

SEQ ID NO: 29884 - DNA, 49 bp, Emericella nidulans
gaattcactgcggccgccatgattcaataacggggccagttttgttttc

SEQ ID NO: 29885 - DNA, 45 bp, Emericella nidulans
gttctcgagacgagcgatcgcgcaccagacatagccgcctacgaa

SEQ ID NO: 29886 - DNA, 46 bp, Emericella nidulans
gaattcactgcggccgccatgccgatccggactcaatcctttagcc

SEQ ID NO: 29887 - DNA, 53 bp, Emericella nidulans
gttctcgagacgagcgatcgctgctccaaaacttgattaaagactatcgtatc

SEQ ID NO: 29888 - DNA, 41 bp, Emericella nidulans
gaattcactgcggccgccatgccaagagcggcccctatccc

SEQ ID NO: 29889 - DNA, 45 bp, Emericella nidulans
gttctcgagacgagcgatcgctgacagagatagtccgcggaaaga

SEQ ID NO: 29890 - DNA, 41 bp, Emericella nidulans
gaattcactgcggccgccatgatcgagcagggccgcaagtg

SEQ ID NO: 29891 - DNA, 44 bp, Emericella nidulans
gttctcgagacgagcgatcgcgctgcaaatgcaacaagccaacc

SEQ ID NO: 29892 - DNA, 49 bp, Emericella nidulans
gaattcactgcggccgccatgtgcacattcgattactctttcgggaagt

SEQ ID NO: 29893 - DNA, 45 bp, Emericella nidulans
gttctcgagacgagcgatcgcaatagcccaacggaagggccagta

SEQ ID NO: 29894 - DNA, 54 bp, Emericella nidulans
gaattcactgcggccgccatgttcagacttgaaaggactttcagttctgtttcc

SEQ ID NO: 29895 - DNA, 47 bp, Emericella nidulans
gttctcgagacgagcgatcgctgtatcctgaaatggttgaacgagca

SEQ ID NO: 29896 - DNA, 54 bp, Emericella nidulans
gaattcactgcggccgccatgaacggaacaataactatcattcgacatcgctaa

SEQ ID NO: 29897 - DNA, 49 bp, Emericella nidulans
gttctcgagacgagcgatcgcattgggaatagccactggattgtctaac

SEQ ID NO: 29898 - DNA, 41 bp, Emericella nidulans
gaattcactgcggccgccatgcacgttgcggctcgctttga

SEQ ID NO: 29899 - DNA, 57 bp, Emericella nidulans
gttctcgagacgagcgatcgcgaatgatgatgtatctaaacagatcatggtgacacg

SEQ ID NO: 29900 - DNA, 42 bp, Emericella nidulans
gaattcactgcggccgccatgggaacctcccccacctcagca

SEQ ID NO: 29901 - DNA, 55 bp, Emericella nidulans
gttctcgagacgagcgatcgcaaggcaaagatatcaattcaatctccgagccaaa

SEQ ID NO: 29902 - DNA, 39 bp, Emericella nidulans
gaattcactgcggccgccatgagctgcgcggcgagcttc

SEQ ID NO: 29903 - DNA, 43 bp, Emericella nidulans
gttctcgagacgagcgatcgccacggcgacggtacttcaatcg

SEQ ID NO: 29904 - DNA, 41 bp, Emericella nidulans
gaattcactgcggccgccatgcgcatctcacccgggcactt

SEQ ID NO: 29905 - DNA, 52 bp, Emericella nidulans
gttctcgagacgagcgatcgctgagagaaataacgggatctattgcataaac

SEQ ID NO: 29906 - DNA, 46 bp, Emericella nidulans
gaattcactgcggccgccatgtggctatttcagcatgtcagctgtg

SEQ ID NO: 29907 - DNA, 57 bp, Emericella nidulans
gttctcgagacgagcgatcgcatgaatggtataagtagttgcccatatatatcttcc

SEQ ID NO: 29908 - DNA, 45 bp, Emericella nidulans
gaattcactgcggccgccatgagagccgaaggtttgtcagctcag

SEQ ID NO: 29909 - DNA, 49 bp, Emericella nidulans
gttctcgagacgagcgatcgcagttttacatcattgtacatccggcatt

SEQ ID NO: 29910 - DNA, 43 bp, Emericella nidulans
gaattcactgcggccgccatgtgatgatcgtccgtgcgttgtg

SEQ ID NO: 29911 - DNA, 44 bp, Emericella nidulans
gttctcgagacgagcgatcgccccttcacccctggtcttccgta

SEQ ID NO: 29912 - DNA, 41 bp, Emericella nidulans
gaattcactgcggccgccatgcactcctggccagtaggaaa

SEQ ID NO: 29913 - DNA, 41 bp, Emericella nidulans
gttctcgagacgagcgatcgcaggcagggtcatactcgaaa

SEQ ID NO: 29914 - DNA, 47 bp, Emericella nidulans
gaattcactgcggccgccatgtcgagagtcgagattctactgcgatt

SEQ ID NO: 29915 - DNA, 47 bp, Emericella nidulans
gttctcgagacgagcgatcgcttgatcctcatcactcctcttcctca

SEQ ID NO: 29916 - DNA, 47 bp, Emericella nidulans
gaattcactgcggccgccatgtccgtatgtactgccatcttccaaca

SEQ ID NO: 29917 - DNA, 43 bp, Emericella nidulans
gttctcgagacgagcgatcgctaggcgaagcagtctcgcattg

SEQ ID NO: 29918 - DNA, 41 bp, Emericella nidulans
gaattcactgcggccgccatgtcattgcaattttcgcagac

SEQ ID NO: 29919 - DNA, 49 bp, Emericella nidulans
gttctcgagacgagcgatcgctagtgcggatattctatattttagtacc

SEQ ID NO: 29920 - DNA, 48 bp, Emericella nidulans
gaattcactgcggccgccatgtgcgggttctaactcgtgcacgaaaac

SEQ ID NO: 29921 - DNA, 49 bp, Emericella nidulans
gttctcgagacgagcgatcgcagtatttgcggaacagaggctaggattg

SEQ ID NO: 29922 - DNA, 41 bp, Emericella nidulans
gaattcactgcggccgccatgatggagaagcgggtattctg

SEQ ID NO: 29923 - DNA, 45 bp, Emericella nidulans
gttctcgagacgagcgatcgcacagatcgaaagacttatcttagc

SEQ ID NO: 29924 - DNA, 45 bp, Emericella nidulans
gaattcactgcggccgccatggaaaacacaaacccagtaaatgtg

SEQ ID NO: 29925 - DNA, 46 bp, Emericella nidulans
gttctcgagacgagcgatcgcgaaatgtttatcagcctacaaaagc

SEQ ID NO: 29926 - DNA, 43 bp, Emericella nidulans
gaattcactgcggccgccatgccggttgttgagctgtcgggat

SEQ ID NO: 29927 - DNA, 49 bp, Emericella nidulans
gttctcgagacgagcgatcgcgtttccttcccctatcaggattgttaga

SEQ ID NO: 29928 - DNA, 39 bp, Emericella nidulans
gaattcactgcggccgccatgggtctctggcgcaacttc

SEQ ID NO: 29929 - DNA, 42 bp, Emericella nidulans
gttctcgagacgagcgatcgctacgaattcaaggttgagaaa

SEQ ID NO: 29930 - DNA, 43 bp, Emericella nidulans
gaattcactgcggccgccatgcgcatatgaggatgatcagaga

SEQ ID NO: 29931 - DNA, 44 bp, Emericella nidulans
gttctcgagacgagcgatcgctgagtttcgtaatttgtgttctt

SEQ ID NO: 29932 - DNA, 45 bp, Emericella nidulans
gaattcactgcggccgccatgcgtcacgatcctctgccgaggtga

SEQ ID NO: 29933 - DNA, 49 bp, Emericella nidulans
gttctcgagacgagcgatcgcgccgttaatcatgagcagtcataacaca

SEQ ID NO: 29934 - DNA, 42 bp, Emericella nidulans
gaattcactgcggccgccatggctttcgcgtgataaatcaat

SEQ ID NO: 29935 - DNA, 46 bp, Emericella nidulans
gttctcgagacgagcgatcgcaaaaagtctcgatctaccctagaca

SEQ ID NO: 29936 - DNA, 44 bp, Emericella nidulans
gaattcactgcggccgccatggcgttctggttctggaggaaaaa

SEQ ID NO: 29937 - DNA, 41 bp, Emericella nidulans
gttctcgagacgagcgatcgccgggtcgggcttcgcaaata

SEQ ID NO: 29938 - DNA, 40 bp, Emericella nidulans
gaattcactgcggccgccatggcgcacggaatgtactgac

SEQ ID NO: 29939 - DNA, 49 bp, Emericella nidulans
gttctcgagacgagcgatcgctaggtatattctttatcaattaaagtgc

SEQ ID NO: 29940 - DNA, 41 bp, Emericella nidulans
gaattcactgcggccgccatgcatcccaattaatccctcca

SEQ ID NO: 29941 - DNA, 42 bp, Emericella nidulans
gttctcgagacgagcgatcgctgggtcctttgcctatacaag

SEQ ID NO: 29942 - DNA, 43 bp, Emericella nidulans
gaattcactgcggccgccatgcacaagcaagcacgagcggttc

SEQ ID NO: 29943 - DNA, 49 bp, Emericella nidulans
gttctcgagacgagcgatcgcacgttcagtttaaagatggtggtagtgg

SEQ ID NO: 29944 - DNA, 49 bp, Emericella nidulans
gaattcactgcggccgccatgtttgagaaatatctatcaagatgaacaa

SEQ ID NO: 29945 - DNA, 48 bp, Emericella nidulans
gttctcgagacgagcgatcgcgctctgtgtagtgtattggataaagaa

SEQ ID NO: 29946 - DNA, 41 bp, Emericella nidulans
gaattcactgcggccgccatgcggactccgccacgaccact

SEQ ID NO: 29947 - DNA, 49 bp, Emericella nidulans
gttctcgagacgagcgatcgctgtagataaccatcagacaacgttccaa

SEQ ID NO: 29948 - DNA, 49 bp, Emericella nidulans
gaattcactgcggccgccatgatggcggtatcttacaatactctggagc

SEQ ID NO: 29949 - DNA, 43 bp, Emericella nidulans
gttctcgagacgagcgatcgcacaacagtgcgcttgtggctga

SEQ ID NO: 29950 - DNA, 41 bp, Emericella nidulans
gaattcactgcggccgccatgcgtcgtcgcactggtataga

SEQ ID NO: 29951 - DNA, 41 bp, Emericella nidulans
gttctcgagacgagcgatcgccgaggaactctaccctgacg

SEQ ID NO: 29952 - DNA, 41 bp, Emericella nidulans
gaattcactgcggccgccatgcgatgactggttccatgttg

SEQ ID NO: 29953 - DNA, 47 bp, Emericella nidulans
gttctcgagacgagcgatcgcgaatgcatttgatatgagtataaaga

SEQ ID NO: 29954 - DNA, 48 bp, Emericella nidulans
gaattcactgcggccgccatggcttagcagagaacatatcggcaatca

SEQ ID NO: 29955 - DNA, 49 bp, Emericella nidulans
gttctcgagacgagcgatcgcacctgtttgtttgaaatatctgcctcgt

SEQ ID NO: 29956 - DNA, 46 bp, Emericella nidulans
gaattcactgcggccgccatgacgtccggggttgtcatttctatcg

SEQ ID NO: 29957 - DNA, 49 bp, Emericella nidulans
gttctcgagacgagcgatcgcatgatcaataaagacttacggccgtgct

SEQ ID NO: 29958 - DNA, 49 bp, Emericella nidulans
gaattcactgcggccgccatgatccctaatcactgtgctttaccagtcc

SEQ ID NO: 29959 - DNA, 49 bp, Emericella nidulans
gttctcgagacgagcgatcgcaaactagctaaaatggtgtagcgcctct

SEQ ID NO: 29960 - DNA, 48 bp, Emericella nidulans
gaattcactgcggccgccatgcgcaacaatctccttctttctgctgtc

SEQ ID NO: 29961 - DNA, 46 bp, Emericella nidulans
gttctcgagacgagcgatcgccacgtacaacagccactgtccagca

SEQ ID NO: 29962 - DNA, 49 bp, Emericella nidulans
gaattcactgcggccgccatgttgatattctaggacacgaagacgtgga

SEQ ID NO: 29963 - DNA, 48 bp, Emericella nidulans
gttctcgagacgagcgatcgcatacggagtcccagagctaataaacca

SEQ ID NO: 29964 - DNA, 46 bp, Emericella nidulans
gaattcactgcggccgccatggtggttaggcgtcttgtttgggtca

SEQ ID NO: 29965 - DNA, 49 bp, Emericella nidulans
gttctcgagacgagcgatcgcacctcacggtacttttcactatcgctta

SEQ ID NO: 29966 - DNA, 43 bp, Emericella nidulans
gaattcactgcggccgccatggggcatgtcaaggacgttacgc

SEQ ID NO: 29967 - DNA, 48 bp, Emericella nidulans
gttctcgagacgagcgatcgctcatccacctgctcatcagtaaaagtc

SEQ ID NO: 29968 - DNA, 49 bp, Emericella nidulans
gaattcactgcggccgccatgaactaatgtttggtcgcttcagtaggaa

SEQ ID NO: 29969 - DNA, 49 bp, Emericella nidulans
gttctcgagacgagcgatcgcagcatcttgtttttcggtcaaaattagc

SEQ ID NO: 29970 - DNA, 41 bp, Emericella nidulans
gaattcactgcggccgccatggatacctgcgctcgctaact

SEQ ID NO: 29971 - DNA, 41 bp, Emericella nidulans
gttctcgagacgagcgatcgcgctgataccaaagcgactgg

SEQ ID NO: 29972 - DNA, 41 bp, Emericella nidulans
gaattcactgcggccgccatgtactccaattctcgctgggt

SEQ ID NO: 29973 - DNA, 44 bp, Emericella nidulans
gttctcgagacgagcgatcgcacaaagcagctttgtactcattg

SEQ ID NO: 29974 - DNA, 41 bp, Emericella nidulans
gaattcactgcggccgccatgatctacaaccccgtcacagc

SEQ ID NO: 29975 - DNA, 49 bp, Emericella nidulans
gttctcgagacgagcgatcgcacttatactgattctcagtttgtgttca

SEQ ID NO: 29976 - DNA, 45 bp, Emericella nidulans
gaattcactgcggccgccatgctcggcttaacacccgctttgtca

SEQ ID NO: 29977 - DNA, 49 bp, Emericella nidulans
gttctcgagacgagcgatcgcttgctatacggaaagtttcagtggtcgt

SEQ ID NO: 29978 - DNA, 41 bp, Emericella nidulans
gaattcactgcggccgccatggtcagacaaagcgagccatt

SEQ ID NO: 29979 - DNA, 47 bp, Emericella nidulans
gttctcgagacgagcgatcgccaattaacggacctagctaaataagg

SEQ ID NO: 29980 - DNA, 43 bp, Emericella nidulans
gaattcactgcggccgccatgaagtcgatgctagacatcatgg

SEQ ID NO: 29981 - DNA, 49 bp, Emericella nidulans
gttctcgagacgagcgatcgctatcagttaactctaatccatatttacc

SEQ ID NO: 29982 - DNA, 42 bp, Emericella nidulans
gaattcactgcggccgccatggcctcaaggagacgccaactg

SEQ ID NO: 29983 - DNA, 41 bp, Emericella nidulans
gttctcgagacgagcgatcgctggagtcttccgcggcgttt

SEQ ID NO: 29984 - DNA, 45 bp, Emericella nidulans
gaattcactgcggccgccatgtcaggggcactctggaatctctca

SEQ ID NO: 29985 - DNA, 47 bp, Emericella nidulans
gttctcgagacgagcgatcgccggtgaatttatccgtttggtaatgc

SEQ ID NO: 29986 - DNA, 41 bp, Emericella nidulans
gaattcactgcggccgccatgaggatgaagccccagaaact

SEQ ID NO: 29987 - DNA, 41 bp, Emericella nidulans
gttctcgagacgagcgatcgcaaacgcccaacaattacgac

SEQ ID NO: 29988 - DNA, 46 bp, Emericella nidulans
gaattcactgcggccgccatgatacccatcagcagctggttctctg

SEQ ID NO: 29989 - DNA, 45 bp, Emericella nidulans
gttctcgagacgagcgatcgcagccaccatgatcgagaagtctgc

SEQ ID NO: 29990 - DNA, 41 bp, Emericella nidulans
gaattcactgcggccgccatgtcgtcaccgtttgtcaaaga

SEQ ID NO: 29991 - DNA, 49 bp, Emericella nidulans
gttctcgagacgagcgatcgcgaaaataacttcttgactttatttgatt

SEQ ID NO: 29992 - DNA, 41 bp, Emericella nidulans
gaattcactgcggccgccatgacgaggtccagtcgtttgac

SEQ ID NO: 29993 - DNA, 40 bp, Emericella nidulans
gttctcgagacgagcgatcgcgcgaactggacactcgaag

SEQ ID NO: 29994 - DNA, 46 bp, Emericella nidulans
gaattcactgcggccgccatgctgcaagaaataatcccatgctgga

SEQ ID NO: 29995 - DNA, 45 bp, Emericella nidulans
gttctcgagacgagcgatcgcagtcttgccatcaggcagacatcg

SEQ ID NO: 29996 - DNA, 49 bp, Emericella nidulans
gaattcactgcggccgccatgtactaacttcattgataaggccgccaac

SEQ ID NO: 29997 - DNA, 49 bp, Emericella nidulans
gttctcgagacgagcgatcgcaaaagcagactaatgacattgggtaacg

SEQ ID NO: 29998 - DNA, 45 bp, Emericella nidulans
gaattcactgcggccgccatggacgctctacaatcaagggaatcg

SEQ ID NO: 29999 - DNA, 49 bp, Emericella nidulans
gttctcgagacgagcgatcgcgataaatagagacggacctttcgccata

SEQ ID NO: 30000 - DNA, 41 bp, Emericella nidulans
gaattcactgcggccgccatgcgtcgctcattcatgctaag

SEQ ID NO: 30001 - DNA, 43 bp, Emericella nidulans
gttctcgagacgagcgatcgccgtcgaacgtcgtatatcattg

SEQ ID NO: 30002 - DNA, 41 bp, Emericella nidulans
gaattcactgcggccgccatgctggttctgagagccaactg

SEQ ID NO: 30003 - DNA, 49 bp, Emericella nidulans
gttctcgagacgagcgatcgcctttatgtatcttgaattagactccaaa

SEQ ID NO: 30004 - DNA, 41 bp, Emericella nidulans
gaattcactgcggccgccatgacacaggcccttgtactgct

SEQ ID NO: 30005 - DNA, 41 bp, Emericella nidulans
gttctcgagacgagcgatcgccaccagccgtaactaccctc

SEQ ID NO: 30006 - DNA, 42 bp, Emericella nidulans
gaattcactgcggccgccatgtggaagactatctcagcaaca

SEQ ID NO: 30007 - DNA, 41 bp, Emericella nidulans
gttctcgagacgagcgatcgccgtggtcatctctcgtgatt

SEQ ID NO: 30008 - DNA, 41 bp, Emericella nidulans
gaattcactgcggccgccatgctgaagtccggctcctaatg

SEQ ID NO: 30009 - DNA, 40 bp, Emericella nidulans
gttctcgagacgagcgatcgcttcactggccaagtcaacg

SEQ ID NO: 30010 - DNA, 41 bp, Emericella nidulans
gaattcactgcggccgccatgacagcctctcaggcagacat

SEQ ID NO: 30011 - DNA, 44 bp, Emericella nidulans
gttctcgagacgagcgatcgctataatggagcacgtcttattcg

SEQ ID NO: 30012 - DNA, 41 bp, Emericella nidulans
gaattcactgcggccgccatgagccgaatggtatcaagctg

SEQ ID NO: 30013 - DNA, 47 bp, Emericella nidulans
gttctcgagacgagcgatcgctgtgccgttaaatatgttttatgttt

SEQ ID NO: 30014 - DNA, 41 bp, Emericella nidulans
gaattcactgcggccgccatgaaggccgagagttcttcctc

SEQ ID NO: 30015 - DNA, 42 bp, Emericella nidulans
gttctcgagacgagcgatcgcagagcacagacttgatcattg

SEQ ID NO: 30016 - DNA, 41 bp, Emericella nidulans
gaattcactgcggccgccatgaagcttcgacgctaacctca

SEQ ID NO: 30017 - DNA, 41 bp, Emericella nidulans
gttctcgagacgagcgatcgccggatgcataaaatccctga

SEQ ID NO: 30018 - DNA, 41 bp, Emericella nidulans
gaattcactgcggccgccatgggcattagcatcctcgacat

SEQ ID NO: 30019 - DNA, 44 bp, Emericella nidulans
gttctcgagacgagcgatcgctcaaatcaacctgatcaatctgt

SEQ ID NO: 30020 - DNA, 41 bp, Emericella nidulans
gaattcactgcggccgccatgggaggaagaagaccgattcc

SEQ ID NO: 30021 - DNA, 49 bp, Emericella nidulans
gttctcgagacgagcgatcgcaactgaaaataagtagattaaagtagcc

SEQ ID NO: 30022 - DNA, 41 bp, Emericella nidulans
gaattcactgcggccgccatgtggcccgccgagatcattgt

SEQ ID NO: 30023 - DNA, 46 bp, Emericella nidulans
gttctcgagacgagcgatcgccccgtttagcgtgccgtacgttatt

SEQ ID NO: 30024 - DNA, 44 bp, Emericella nidulans
gaattcactgcggccgccatgcgtctgaccggctggtctactgg

SEQ ID NO: 30025 - DNA, 46 bp, Emericella nidulans
gttctcgagacgagcgatcgccattgcttatcctggcatcaattcg

SEQ ID NO: 30026 - DNA, 41 bp, Emericella nidulans
gaattcactgcggccgccatgtcgacaatatcatcccgaca

SEQ ID NO: 30027 - DNA, 49 bp, Emericella nidulans
gttctcgagacgagcgatcgcgggtctattagtctactctattaccatt

SEQ ID NO: 30028 - DNA, 49 bp, Emericella nidulans
gaattcactgcggccgccatgaccgttgaataattcaaggaaaggaaag

SEQ ID NO: 30029 - DNA, 49 bp, Emericella nidulans
gttctcgagacgagcgatcgcacttacatgccgagaagaaccataaacc

SEQ ID NO: 30030 - DNA, 41 bp, Emericella nidulans
gaattcactgcggccgccatgtgaaggccaaggtttttcag

SEQ ID NO: 30031 - DNA, 41 bp, Emericella nidulans
gttctcgagacgagcgatcgcgcggcgtcataaattcaaac

SEQ ID NO: 30032 - DNA, 41 bp, Emericella nidulans
gaattcactgcggccgccatgtggcgccgtgaccgaaatct

SEQ ID NO: 30033 - DNA, 49 bp, Emericella nidulans
gttctcgagacgagcgatcgctattatcttccagaatcatgcagaagca

SEQ ID NO: 30034 - DNA, 41 bp, Emericella nidulans
gaattcactgcggccgccatgccccatcccggagacgtcaa

SEQ ID NO: 30035 - DNA, 46 bp, Emericella nidulans
gttctcgagacgagcgatcgccttgaccttgggaggctcttccatc

SEQ ID NO: 30036 - DNA, 48 bp, Emericella nidulans
gaattcactgcggccgccatgtcctgatctcgctttagacaccatcca

SEQ ID NO: 30037 - DNA, 48 bp, Emericella nidulans
gttctcgagacgagcgatcgcacctacaccccaagagaaatcgcaatc

SEQ ID NO: 30038 - DNA, 41 bp, Emericella nidulans
gaattcactgcggccgccatgtgctgtgctcaggtcagact

SEQ ID NO: 30039 - DNA, 45 bp, Emericella nidulans
gttctcgagacgagcgatcgctcgaaacaataaaatcgttacaaa

SEQ ID NO: 30040 - DNA, 41 bp, Emericella nidulans
gaattcactgcggccgccatggaggccgtctatggtgagaa

SEQ ID NO: 30041 - DNA, 48 bp, Emericella nidulans
gttctcgagacgagcgatcgcgaaattgaagagagaaaatgaattaac

SEQ ID NO: 30042 - DNA, 42 bp, Emericella nidulans
gaattcactgcggccgccatgggcgttcacctagcattaaca

SEQ ID NO: 30043 - DNA, 49 bp, Emericella nidulans
gttctcgagacgagcgatcgcaacaatactgtctattcattatcgccac

SEQ ID NO: 30044 - DNA, 47 bp, Emericella nidulans
gaattcactgcggccgccatgtcagcgattctgatcaatcagccact

SEQ ID NO: 30045 - DNA, 49 bp, Emericella nidulans
gttctcgagacgagcgatcgcttatttgaaagacatttccaactggacc

SEQ ID NO: 30046 - DNA, 40 bp, Emericella nidulans
gaattcactgcggccgccatggggatgctcccgggcaaaa

SEQ ID NO: 30047 - DNA, 49 bp, Emericella nidulans
gttctcgagacgagcgatcgctatcccatgataaggtattcctgtcgtc

SEQ ID NO: 30048 - DNA, 48 bp, Emericella nidulans
gaattcactgcggccgccatggcgaatgatttcaaggtcagtgttctg

SEQ ID NO: 30049 - DNA, 49 bp, Emericella nidulans
gttctcgagacgagcgatcgctcgagtcctattggcaattctacctaaa

SEQ ID NO: 30050 - DNA, 49 bp, Emericella nidulans
gaattcactgcggccgccatgaatagatccactacaatccaacccaacc

SEQ ID NO: 30051 - DNA, 44 bp, Emericella nidulans
gttctcgagacgagcgatcgcgtggtgcccgttgaatcaatcat

SEQ ID NO: 30052 - DNA, 41 bp, Emericella nidulans
gaattcactgcggccgccatgtcgtgaatgaccttcccttc

SEQ ID NO: 30053 - DNA, 41 bp, Emericella nidulans
gttctcgagacgagcgatcgctcacgggtgatagtgagtgg

SEQ ID NO: 30054 - DNA, 46 bp, Emericella nidulans
gaattcactgcggccgccatgtaagatccagagaataacccctctt

SEQ ID NO: 30055 - DNA, 49 bp, Emericella nidulans
gttctcgagacgagcgatcgctgtgatcagagtctattataaatgaaaa

SEQ ID NO: 30056 - DNA, 41 bp, Emericella nidulans
gaattcactgcggccgccatgcgatgctcctaaacgtgtca

SEQ ID NO: 30057 - DNA, 45 bp, Emericella nidulans
gttctcgagacgagcgatcgcgaaacgttcgtatgattagcaatg

SEQ ID NO: 30058 - DNA, 44 bp, Emericella nidulans
gaattcactgcggccgccatgggtattggaagcagtacgctctt

SEQ ID NO: 30059 - DNA, 47 bp, Emericella nidulans
gttctcgagacgagcgatcgcaagaaaagtctttgaaatcgtaagga

SEQ ID NO: 30060 - DNA, 45 bp, Emericella nidulans
gaattcactgcggccgccatgtcccaattgaccaacttcacctcc

SEQ ID NO: 30061 - DNA, 45 bp, Emericella nidulans
gttctcgagacgagcgatcgctgcgtcgtaaccaggtacgatatg

SEQ ID NO: 30062 - DNA, 39 bp, Emericella nidulans
gaattcactgcggccgccatgactctcccatccgcacaa

SEQ ID NO: 30063 - DNA, 44 bp, Emericella nidulans
gttctcgagacgagcgatcgctcttttcctatattgacgtttcg

SEQ ID NO: 30064 - DNA, 41 bp, Emericella nidulans
gaattcactgcggccgccatggcaaggccgtccgattgctt

SEQ ID NO: 30065 - DNA, 46 bp, Emericella nidulans
gttctcgagacgagcgatcgcatggcatccacttcaatctccacca

SEQ ID NO: 30066 - DNA, 39 bp, Emericella nidulans
gaattcactgcggccgccatgccgcagccgttaaagacg

SEQ ID NO: 30067 - DNA, 42 bp, Emericella nidulans
gttctcgagacgagcgatcgctaaccaagcaattgaaaatgt

SEQ ID NO: 30068 - DNA, 45 bp, Emericella nidulans
gaattcactgcggccgccatgagtcatatgcttgtctcaaagatt

SEQ ID NO: 30069 - DNA, 41 bp, Emericella nidulans
gttctcgagacgagcgatcgcttacgagacccaaaagagcc

SEQ ID NO: 30070 - DNA, 41 bp, Emericella nidulans
gaattcactgcggccgccatgcgggccgctggcttcttagg

SEQ ID NO: 30071 - DNA, 39 bp, Emericella nidulans
gttctcgagacgagcgatcgcgtgccgccgctgcctttc

SEQ ID NO: 30072 - DNA, 49 bp, Emericella nidulans
gaattcactgcggccgccatgacatccggtccatgctattaattcacga

SEQ ID NO: 30073 - DNA, 41 bp, Emericella nidulans
gttctcgagacgagcgatcgcggccaccacaggccatgaca

SEQ ID NO: 30074 - DNA, 45 bp, Emericella nidulans
gaattcactgcggccgccatgaagatcagcaatccggagtacatt

SEQ ID NO: 30075 - DNA, 42 bp, Emericella nidulans
gttctcgagacgagcgatcgcatggcattcattacgctttct

SEQ ID NO: 30076 - DNA, 41 bp, Emericella nidulans
gaattcactgcggccgccatggatatgcgagcacctccttc

SEQ ID NO: 30077 - DNA, 42 bp, Emericella nidulans
gttctcgagacgagcgatcgcactgtgccttccttgcatagt

SEQ ID NO: 30078 - DNA, 41 bp, Emericella nidulans
gaattcactgcggccgccatgcgcccttgttcggctgatcg

SEQ ID NO: 30079 - DNA, 41 bp, Emericella nidulans
gttctcgagacgagcgatcgccccatggattgggacgggag

SEQ ID NO: 30080 - DNA, 42 bp, Emericella nidulans
gaattcactgcggccgccatgtggtggaatgggcgtcactgt

SEQ ID NO: 30081 - DNA, 46 bp, Emericella nidulans
gttctcgagacgagcgatcgcaatcagatgaccagtgggcaagtcc

SEQ ID NO: 30082 - DNA, 44 bp, Emericella nidulans
gaattcactgcggccgccatgtccacaagctgactggacgagca

SEQ ID NO: 30083 - DNA, 49 bp, Emericella nidulans
gttctcgagacgagcgatcgcccaagccaagaatatgtattcgagaacc

SEQ ID NO: 30084 - DNA, 40 bp, Emericella nidulans
gaattcactgcggccgccatggctgggaactgacacatgg

SEQ ID NO: 30085 - DNA, 41 bp, Emericella nidulans
gttctcgagacgagcgatcgccggtcgagggagtagaagaa

SEQ ID NO: 30086 - DNA, 48 bp, Emericella nidulans
gaattcactgcggccgccatggatgaagaacgcagcgaactgcgataa

SEQ ID NO: 30087 - DNA, 41 bp, Emericella nidulans
gttctcgagacgagcgatcgcacgggcaccctgcccaagac

SEQ ID NO: 30088 - DNA, 49 bp, Emericella nidulans
gaattcactgcggccgccatgtatgtagcgagctcagtagtagggcttc

SEQ ID NO: 30089 - DNA, 48 bp, Emericella nidulans
gttctcgagacgagcgatcgcgtgagtgtatccgcggcagcgtatctg

SEQ ID NO: 30090 - DNA, 49 bp, Emericella nidulans
gaattcactgcggccgccatgctgctctaaccagtccatcatatctcca

SEQ ID NO: 30091 - DNA, 43 bp, Emericella nidulans
gttctcgagacgagcgatcgcacgccagaacgccgaggtatgt

SEQ ID NO: 30092 - DNA, 40 bp, Emericella nidulans
gaattcactgcggccgccatgagggtggggacctccagat

SEQ ID NO: 30093 - DNA, 41 bp, Emericella nidulans
gttctcgagacgagcgatcgcccttgcgaagcttcatttca

SEQ ID NO: 30094 - DNA, 49 bp, Emericella nidulans
gaattcactgcggccgccatggagaaacacatcccagagcatctctatc

SEQ ID NO: 30095 - DNA, 47 bp, Emericella nidulans
gttctcgagacgagcgatcgcatttctcaaccggccctaaaacaaca

SEQ ID NO: 30096 - DNA, 43 bp, Emericella nidulans
gaattcactgcggccgccatggcgatggttcattcaaatttct

SEQ ID NO: 30097 - DNA, 41 bp, Emericella nidulans
gttctcgagacgagcgatcgcgttccccagaaggaaaggtc

SEQ ID NO: 30098 - DNA, 47 bp, Emericella nidulans
gaattcactgcggccgccatggccggtaaggtcagctgtcttcttga

SEQ ID NO: 30099 - DNA, 49 bp, Emericella nidulans
gttctcgagacgagcgatcgcaaagagaaaagttttctgcaagtgctcc

SEQ ID NO: 30100 - DNA, 46 bp, Emericella nidulans
gaattcactgcggccgccatggaggggttctctcggactaataggg

SEQ ID NO: 30101 - DNA, 46 bp, Emericella nidulans
gttctcgagacgagcgatcgcaacgacagcactgaattaagcagca

SEQ ID NO: 30102 - DNA, 42 bp, Emericella nidulans
gaattcactgcggccgccatgtggtcgaactgggcggtatgc

SEQ ID NO: 30103 - DNA, 48 bp, Emericella nidulans
gttctcgagacgagcgatcgcaaaacaggcatacctccggctggcttg

SEQ ID NO: 30104 - DNA, 48 bp, Emericella nidulans
gaattcactgcggccgccatgccccatttgtcgtctacttgaagaccc

SEQ ID NO: 30105 - DNA, 49 bp, Emericella nidulans
gttctcgagacgagcgatcgctatactatgacgagcagcggatatagcg

SEQ ID NO: 30106 - DNA, 48 bp, Emericella nidulans
gaattcactgcggccgccatgcttagtaggctatgttggtgtagttga

SEQ ID NO: 30107 - DNA, 42 bp, Emericella nidulans
gttctcgagacgagcgatcgcccaccttcacaagatcaagga

SEQ ID NO: 30108 - DNA, 46 bp, Emericella nidulans
gaattcactgcggccgccatgtctcagaaacacgggacagcactcg

SEQ ID NO: 30109 - DNA, 49 bp, Emericella nidulans
gttctcgagacgagcgatcgcagaggcacaatgtgtatatgggtttgtg

SEQ ID NO: 30110 - DNA, 41 bp, Emericella nidulans
gaattcactgcggccgccatgcccgccatgtcgagcacatt

SEQ ID NO: 30111 - DNA, 46 bp, Emericella nidulans
gttctcgagacgagcgatcgcaaccagcagggttaaaagaaagcaa

SEQ ID NO: 30112 - DNA, 48 bp, Emericella nidulans
gaattcactgcggccgccatgtgtcactgattcaatgcttcgtacttg

SEQ ID NO: 30113 - DNA, 42 bp, Emericella nidulans
gttctcgagacgagcgatcgcccctttgcagtccactcctcc

SEQ ID NO: 30114 - DNA, 44 bp, Emericella nidulans
gaattcactgcggccgccatgcgcattggaagacaccgcaggtt

SEQ ID NO: 30115 - DNA, 42 bp, Emericella nidulans
gttctcgagacgagcgatcgctcaccgcggctaagagtgctg

SEQ ID NO: 30116 - DNA, 49 bp, Emericella nidulans
gaattcactgcggccgccatgaagtgtgaacttagacgaggacgaagag

SEQ ID NO: 30117 - DNA, 43 bp, Emericella nidulans
gttctcgagacgagcgatcgcaggagggccagatcccagataa

SEQ ID NO: 30118 - DNA, 46 bp, Emericella nidulans
gaattcactgcggccgccatgtgcttgcaggtgagtctttgtgacc

SEQ ID NO: 30119 - DNA, 49 bp, Emericella nidulans
gttctcgagacgagcgatcgctgaagtttaattatccccacaatcagga

SEQ ID NO: 30120 - DNA, 41 bp, Emericella nidulans
gaattcactgcggccgccatgctggattcccaacgagacat

SEQ ID NO: 30121 - DNA, 45 bp, Emericella nidulans
gttctcgagacgagcgatcgcgaaaggcagatcagtaagattgaa

SEQ ID NO: 30122 - DNA, 48 bp, Emericella nidulans
gaattcactgcggccgccatgtcagtatttcctccacaaactgcctcc

SEQ ID NO: 30123 - DNA, 49 bp, Emericella nidulans
gttctcgagacgagcgatcgcagatgcggatagtaagtcaggctaaagg

SEQ ID NO: 30124 - DNA, 45 bp, Emericella nidulans
gaattcactgcggccgccatgcggacaagctggaaaaattggacc

SEQ ID NO: 30125 - DNA, 44 bp, Emericella nidulans
gttctcgagacgagcgatcgccctttgatgggcctgaaggtaga

SEQ ID NO: 30126 - DNA, 42 bp, Emericella nidulans
gaattcactgcggccgccatgcgcctgtttcgtctgcgttcc

SEQ ID NO: 30127 - DNA, 47 bp, Emericella nidulans
gttctcgagacgagcgatcgctctccttacctgagatggcatagctc

SEQ ID NO: 30128 - DNA, 41 bp, Emericella nidulans
gaattcactgcggccgccatgcgttctggccccggggagta

SEQ ID NO: 30129 - DNA, 48 bp, Emericella nidulans
gttctcgagacgagcgatcgcttttcagatccagtggattttgccttg

SEQ ID NO: 30130 - DNA, 41 bp, Emericella nidulans
gaattcactgcggccgccatgtgatgtctgaagccaccatc

SEQ ID NO: 30131 - DNA, 49 bp, Emericella nidulans
gttctcgagacgagcgatcgcacatttgagaagtataatataggccaag

SEQ ID NO: 30132 - DNA, 45 bp, Emericella nidulans
gaattcactgcggccgccatgatgtcccgttcctttacggaagca

SEQ ID NO: 30133 - DNA, 46 bp, Emericella nidulans
gttctcgagacgagcgatcgcacggaaccaatggcctatttcagca

SEQ ID NO: 30134 - DNA, 47 bp, Emericella nidulans
gaattcactgcggccgccatgcgactcatcccctcaatatcgaaaca

SEQ ID NO: 30135 - DNA, 49 bp, Emericella nidulans
gttctcgagacgagcgatcgctgtgtatttctatcccttagcagcgaac

SEQ ID NO: 30136 - DNA, 41 bp, Emericella nidulans
gaattcactgcggccgccatggtcgcgccatgaagcgtctc

SEQ ID NO: 30137 - DNA, 49 bp, Emericella nidulans
gttctcgagacgagcgatcgcaagttgaagttcccatttgatgatgaag

SEQ ID NO: 30138 - DNA, 40 bp, Emericella nidulans
gaattcactgcggccgccatgcttgcatttccgggtttct

SEQ ID NO: 30139 - DNA, 44 bp, Emericella nidulans
gttctcgagacgagcgatcgctgcaaggtaacaaaagtgtcaaa

SEQ ID NO: 30140 - DNA, 47 bp, Emericella nidulans
gaattcactgcggccgccatgtccagaatctcttgaaagtcgaacca

SEQ ID NO: 30141 - DNA, 49 bp, Emericella nidulans
gttctcgagacgagcgatcgcttggttaactctttcctattgtgcaggt

SEQ ID NO: 30142 - DNA, 42 bp, Emericella nidulans
gaattcactgcggccgccatggatttcagcgtctccgtggtg

SEQ ID NO: 30143 - DNA, 49 bp, Emericella nidulans
gttctcgagacgagcgatcgcatattcagtgccaagaaggtaggtgaaa

SEQ ID NO: 30144 - DNA, 47 bp, Emericella nidulans
gaattcactgcggccgccatgggtccgctaaaatagcgaaactctcc

SEQ ID NO: 30145 - DNA, 45 bp, Emericella nidulans
gttctcgagacgagcgatcgcgccatggatcctgatcatcgaagc

SEQ ID NO: 30146 - DNA, 45 bp, Emericella nidulans
gaattcactgcggccgccatgcgctgaaagaccagatcctcatgc

SEQ ID NO: 30147 - DNA, 41 bp, Emericella nidulans
gttctcgagacgagcgatcgcatccgcccgctaaccgtgtg

SEQ ID NO: 30148 - DNA, 41 bp, Emericella nidulans
gaattcactgcggccgccatgatacacttccgccccgcaca

SEQ ID NO: 30149 - DNA, 49 bp, Emericella nidulans
gttctcgagacgagcgatcgcatgtattatttacagacgccgctcagaa

SEQ ID NO: 30150 - DNA, 45 bp, Emericella nidulans
gaattcactgcggccgccatgcccacttctggaacaccgtcaagc

SEQ ID NO: 30151 - DNA, 45 bp, Emericella nidulans
gttctcgagacgagcgatcgcctcatcctgcttcaatccagagcc

SEQ ID NO: 30152 - DNA, 47 bp, Emericella nidulans
gaattcactgcggccgccatgcagtattgcacgtggtgggcttatcc

SEQ ID NO: 30153 - DNA, 42 bp, Emericella nidulans
gttctcgagacgagcgatcgcagcaacaacactgcccaaacg

SEQ ID NO: 30154 - DNA, 45 bp, Emericella nidulans
gaattcactgcggccgccatgacaacagcagctctgaacgcaacg

SEQ ID NO: 30155 - DNA, 49 bp, Emericella nidulans
gttctcgagacgagcgatcgccaaatatccattagacaccgagactcca

SEQ ID NO: 30156 - DNA, 41 bp, Emericella nidulans
gaattcactgcggccgccatgagttcctgccgccccagctc

SEQ ID NO: 30157 - DNA, 49 bp, Emericella nidulans
gttctcgagacgagcgatcgcgttacagctgatttgggcctgaattcct

SEQ ID NO: 30158 - DNA, 41 bp, Emericella nidulans
gaattcactgcggccgccatgcgaggctggtgttttcctta

SEQ ID NO: 30159 - DNA, 44 bp, Emericella nidulans
gttctcgagacgagcgatcgccgatatgattgatgaaaatcgaa

SEQ ID NO: 30160 - DNA, 45 bp, Emericella nidulans
gaattcactgcggccgccatgcctgtcggagtcattgtcggtttg

SEQ ID NO: 30161 - DNA, 49 bp, Emericella nidulans
gttctcgagacgagcgatcgcaacacaagaagtcggaaagaaacggatt

SEQ ID NO: 30162 - DNA, 41 bp, Emericella nidulans
gaattcactgcggccgccatgtcgtcatccgcacgctgtca

SEQ ID NO: 30163 - DNA, 41 bp, Emericella nidulans
gttctcgagacgagcgatcgcgctcgcgggctgagttgcat

SEQ ID NO: 30164 - DNA, 48 bp, Emericella nidulans
gaattcactgcggccgccatgtggattgatatcctctacctgcacacg

SEQ ID NO: 30165 - DNA, 49 bp, Emericella nidulans
gttctcgagacgagcgatcgcggagacgaatcatattcatccatattgc

SEQ ID NO: 30166 - DNA, 41 bp, Emericella nidulans
gaattcactgcggccgccatggcggcttatgtcactggttt

SEQ ID NO: 30167 - DNA, 44 bp, Emericella nidulans
gttctcgagacgagcgatcgcccttgtcaaagttcttcaagagg

SEQ ID NO: 30168 - DNA, 46 bp, Emericella nidulans
gaattcactgcggccgccatgctatattacgatcgacgagtcagag

SEQ ID NO: 30169 - DNA, 46 bp, Emericella nidulans
gttctcgagacgagcgatcgcagattactttccagaattgagatcc

SEQ ID NO: 30170 - DNA, 41 bp, Emericella nidulans
gaattcactgcggccgccatgtcctgccggtgccttctgct

SEQ ID NO: 30171 - DNA, 49 bp, Emericella nidulans
gttctcgagacgagcgatcgcttgaatagttctcgcactgtaggaatcg

SEQ ID NO: 30172 - DNA, 41 bp, Emericella nidulans
gaattcactgcggccgccatggcgacgccccagtcgatgtt

SEQ ID NO: 30173 - DNA, 49 bp, Emericella nidulans
gttctcgagacgagcgatcgcgagctgaagagctaattgaagacggaac

SEQ ID NO: 30174 - DNA, 41 bp, Emericella nidulans
gaattcactgcggccgccatgattcaccgacgattctcacc

SEQ ID NO: 30175 - DNA, 46 bp, Emericella nidulans
gttctcgagacgagcgatcgccagtcaaccagatcggatatattgt

SEQ ID NO: 30176 - DNA, 41 bp, Emericella nidulans
gaattcactgcggccgccatgtcgcgtgtttcggcgagtgt

SEQ ID NO: 30177 - DNA, 43 bp, Emericella nidulans
gttctcgagacgagcgatcgcacgcagggcgagaccatactcc

SEQ ID NO: 30178 - DNA, 49 bp, Emericella nidulans
gaattcactgcggccgccatgcttgcttatctggacattcttgctcttt

SEQ ID NO: 30179 - DNA, 49 bp, Emericella nidulans
gttctcgagacgagcgatcgcacggcgtgtataaggtaggattagaacg

SEQ ID NO: 30180 - DNA, 41 bp, Emericella nidulans
gaattcactgcggccgccatgcggcacgacgtggaccaatg

SEQ ID NO: 30181 - DNA, 49 bp, Emericella nidulans
gttctcgagacgagcgatcgcatatctctttgtcactggaggtcgcttt

SEQ ID NO: 30182 - DNA, 41 bp, Emericella nidulans
gaattcactgcggccgccatgtgtctatcggacgaagtgga

SEQ ID NO: 30183 - DNA, 42 bp, Emericella nidulans
gttctcgagacgagcgatcgcaacgggaagtgtagtttcatt

SEQ ID NO: 30184 - DNA, 46 bp, Emericella nidulans
gaattcactgcggccgccatgtggtacggtggtgataggtccgtca

SEQ ID NO: 30185 - DNA, 49 bp, Emericella nidulans
gttctcgagacgagcgatcgctcatagttggtaggtcattttccctgct

SEQ ID NO: 30186 - DNA, 41 bp, Emericella nidulans
gaattcactgcggccgccatgcattgccacctgctcttcta

SEQ ID NO: 30187 - DNA, 46 bp, Emericella nidulans
gttctcgagacgagcgatcgctcaaaaatattgtggcttaattctg

SEQ ID NO: 30188 - DNA, 41 bp, Emericella nidulans
gaattcactgcggccgccatggatgccaccactgtcttgtc

SEQ ID NO: 30189 - DNA, 45 bp, Emericella nidulans
gttctcgagacgagcgatcgccaacaaaagaaatgatacatgttg

SEQ ID NO: 30190 - DNA, 41 bp, Emericella nidulans
gaattcactgcggccgccatggcaggatccgttcatttcag

SEQ ID NO: 30191 - DNA, 41 bp, Emericella nidulans
gttctcgagacgagcgatcgctttttggatggttcctgagc

SEQ ID NO: 30192 - DNA, 47 bp, Emericella nidulans
gaattcactgcggccgccatgacgctcaatgcgccttaggtcgacaa

SEQ ID NO: 30193 - DNA, 49 bp, Emericella nidulans
gttctcgagacgagcgatcgcggacataaaaagctaagcgtaacgagtg

SEQ ID NO: 30194 - DNA, 41 bp, Emericella nidulans
gaattcactgcggccgccatgaaccaaacgcgtctaaatcg

SEQ ID NO: 30195 - DNA, 42 bp, Emericella nidulans
gttctcgagacgagcgatcgcaaaatgcaaggatttggggta

SEQ ID NO: 30196 - DNA, 41 bp, Emericella nidulans
gaattcactgcggccgccatggccacagggctcgcagcatt

SEQ ID NO: 30197 - DNA, 49 bp, Emericella nidulans
gttctcgagacgagcgatcgcacagaagaacaacagcgttggatattga

SEQ ID NO: 30198 - DNA, 41 bp, Emericella nidulans
gaattcactgcggccgccatgtgggtgtgaccgcagccttc

SEQ ID NO: 30199 - DNA, 49 bp, Emericella nidulans
gttctcgagacgagcgatcgctcttaaataccctagcgatgatccgtca

SEQ ID NO: 30200 - DNA, 43 bp, Emericella nidulans
gaattcactgcggccgccatgccacggcctccaatccctactg

SEQ ID NO: 30201 - DNA, 41 bp, Emericella nidulans
gttctcgagacgagcgatcgcctcgtgaggcctgccgcttg

SEQ ID NO: 30202 - DNA, 40 bp, Emericella nidulans
gaattcactgcggccgccatggcgcgatgggcgactcttt

SEQ ID NO: 30203 - DNA, 46 bp, Emericella nidulans
gttctcgagacgagcgatcgcaaatatagaaagccgcgcagcgtaa

SEQ ID NO: 30204 - DNA, 41 bp, Emericella nidulans
gaattcactgcggccgccatgttgaaggtgtccaacagtgg

SEQ ID NO: 30205 - DNA, 45 bp, Emericella nidulans
gttctcgagacgagcgatcgctgtacaatatgaacaagataccca

SEQ ID NO: 30206 - DNA, 45 bp, Emericella nidulans
gaattcactgcggccgccatgataaagagaaccaagcaggagaag

SEQ ID NO: 30207 - DNA, 45 bp, Emericella nidulans
gttctcgagacgagcgatcgcctctaaaggtgtctattcattggt

SEQ ID NO: 30208 - DNA, 45 bp, Emericella nidulans
gaattcactgcggccgccatgggtagcagcaaaccctacctcacg

SEQ ID NO: 30209 - DNA, 49 bp, Emericella nidulans
gttctcgagacgagcgatcgctaattcaatgcgagattatgcctattgc

SEQ ID NO: 30210 - DNA, 49 bp, Emericella nidulans
gaattcactgcggccgccatgggtgcaaacattctcttcctcggcacaa

SEQ ID NO: 30211 - DNA, 49 bp, Emericella nidulans
gttctcgagacgagcgatcgcggaaagcccttaaagagggattagaatg

SEQ ID NO: 30212 - DNA, 41 bp, Emericella nidulans
gaattcactgcggccgccatgggtcggaatgagaattttgc

SEQ ID NO: 30213 - DNA, 48 bp, Emericella nidulans
gttctcgagacgagcgatcgcttattccatgagattagattcactcaa

SEQ ID NO: 30214 - DNA, 49 bp, Emericella nidulans
gaattcactgcggccgccatgctctgctaacacatctcagcctgtcacg

SEQ ID NO: 30215 - DNA, 49 bp, Emericella nidulans
gttctcgagacgagcgatcgcgaatactaacgaggataacacgcgacct

SEQ ID NO: 30216 - DNA, 49 bp, Emericella nidulans
gaattcactgcggccgccatgagttcaaaacccaattctcaatatgcaa

SEQ ID NO: 30217 - DNA, 49 bp, Emericella nidulans
gttctcgagacgagcgatcgcattgatggtattaatgggaaggcgtagc

SEQ ID NO: 30218 - DNA, 44 bp, Emericella nidulans
gaattcactgcggccgccatggttttagcgtatacagccgtttt

SEQ ID NO: 30219 - DNA, 41 bp, Emericella nidulans
gttctcgagacgagcgatcgcccacacgctggctatctacc

SEQ ID NO: 30220 - DNA, 41 bp, Emericella nidulans
gaattcactgcggccgccatgatgaagtcagggagcgttca

SEQ ID NO: 30221 - DNA, 47 bp, Emericella nidulans
gttctcgagacgagcgatcgctgtttatatctgaatcttgaatgagt

SEQ ID NO: 30222 - DNA, 42 bp, Emericella nidulans
gaattcactgcggccgccatggtcgataccttgccgccaccc

SEQ ID NO: 30223 - DNA, 49 bp, Emericella nidulans
gttctcgagacgagcgatcgcgcaaagcggaattgtatccaagatattc

SEQ ID NO: 30224 - DNA, 49 bp, Emericella nidulans
gaattcactgcggccgccatgttttacaaactcaagctcgacgacctaa

SEQ ID NO: 30225 - DNA, 49 bp, Emericella nidulans
gttctcgagacgagcgatcgcccaacagcttagaagcctcagttgataa

SEQ ID NO: 30226 - DNA, 49 bp, Emericella nidulans
gaattcactgcggccgccatgtcacaggttggaaataataggtctaccg

SEQ ID NO: 30227 - DNA, 45 bp, Emericella nidulans
gttctcgagacgagcgatcgctggaaatggaatttatgtggcacc

SEQ ID NO: 30228 - DNA, 41 bp, Emericella nidulans
gaattcactgcggccgccatgttatacatcgccgtcccatt

SEQ ID NO: 30229 - DNA, 41 bp, Emericella nidulans
gttctcgagacgagcgatcgcgccgctcattgtactacggt

SEQ ID NO: 30230 - DNA, 41 bp, Emericella nidulans
gaattcactgcggccgccatggatgcgcaccgccgactacc

SEQ ID NO: 30231 - DNA, 49 bp, Emericella nidulans
gttctcgagacgagcgatcgctagtcctgatgcaaattactcgcagatg

SEQ ID NO: 30232 - DNA, 49 bp, Emericella nidulans
gaattcactgcggccgccatgactgacgtgaactatcaaattccatcca

SEQ ID NO: 30233 - DNA, 49 bp, Emericella nidulans
gttctcgagacgagcgatcgctataggtcacgaacccgactatcattca

SEQ ID NO: 30234 - DNA, 49 bp, Emericella nidulans
gaattcactgcggccgccatggtcagtggctgtgctatttttattcctc

SEQ ID NO: 30235 - DNA, 49 bp, Emericella nidulans
gttctcgagacgagcgatcgcaatggacattttctcatctcttccttcc

SEQ ID NO: 30236 - DNA, 42 bp, Emericella nidulans
gaattcactgcggccgccatgtcccggacggttcctttacgg

SEQ ID NO: 30237 - DNA, 49 bp, Emericella nidulans
gttctcgagacgagcgatcgccgccatataaataacctttcattgcaca

SEQ ID NO: 30238 - DNA, 48 bp, Emericella nidulans
gaattcactgcggccgccatgtttttatataattgcgaacattactcc

SEQ ID NO: 30239 - DNA, 46 bp, Emericella nidulans
gttctcgagacgagcgatcgctataagggatttttccccttacttt

SEQ ID NO: 30240 - DNA, 41 bp, Emericella nidulans
gaattcactgcggccgccatgcgctggacagccgccatctt

SEQ ID NO: 30241 - DNA, 49 bp, Emericella nidulans
gttctcgagacgagcgatcgccttaaataaccggattccaaagcgagga

SEQ ID NO: 30242 - DNA, 41 bp, Emericella nidulans
gaattcactgcggccgccatgcgccccctctcagcaggtca

SEQ ID NO: 30243 - DNA, 49 bp, Emericella nidulans
gttctcgagacgagcgatcgcatccgccatttatctcattacacagtcc

SEQ ID NO: 30244 - DNA, 41 bp, Emericella nidulans
gaattcactgcggccgccatgtcaagttcctctgcggctat

SEQ ID NO: 30245 - DNA, 44 bp, Emericella nidulans
gttctcgagacgagcgatcgcaaaaatccttcattttgttcgtc

SEQ ID NO: 30246 - DNA, 45 bp, Emericella nidulans
gaattcactgcggccgccatgcagcaacagaacaacgaccacctg

SEQ ID NO: 30247 - DNA, 49 bp, Emericella nidulans
gttctcgagacgagcgatcgcggtggtagatccttccccatctatttga

SEQ ID NO: 30248 - DNA, 41 bp, Emericella nidulans
gaattcactgcggccgccatgtgctcgacggatggaagata

SEQ ID NO: 30249 - DNA, 46 bp, Emericella nidulans
gttctcgagacgagcgatcgcgttcacaaataagctggtacaaatg

SEQ ID NO: 30250 - DNA, 40 bp, Emericella nidulans
gaattcactgcggccgccatgacatgacgtctctcgccac

SEQ ID NO: 30251 - DNA, 41 bp, Emericella nidulans
gttctcgagacgagcgatcgccactgcgttcctatgcaaac

SEQ ID NO: 30252 - DNA, 41 bp, Emericella nidulans
gaattcactgcggccgccatgtgaatggataactcggggag

SEQ ID NO: 30253 - DNA, 41 bp, Emericella nidulans
gttctcgagacgagcgatcgcaatgcattgaaggcgaaact

SEQ ID NO: 30254 - DNA, 47 bp, Emericella nidulans
gaattcactgcggccgccatgctatcaaaccagtcctgcctcccctc

SEQ ID NO: 30255 - DNA, 41 bp, Emericella nidulans
gttctcgagacgagcgatcgcgcctcggcgcccaagtatgc

SEQ ID NO: 30256 - DNA, 48 bp, Emericella nidulans
gaattcactgcggccgccatggcagtaatgactgatctggctgaaaaa

SEQ ID NO: 30257 - DNA, 49 bp, Emericella nidulans
gttctcgagacgagcgatcgccgaagtacagcctgaatctagccacgtt

SEQ ID NO: 30258 - DNA, 42 bp, Emericella nidulans
gaattcactgcggccgccatgtctagagaccatgacggagga

SEQ ID NO: 30259 - DNA, 47 bp, Emericella nidulans
gttctcgagacgagcgatcgcggactgcaagactttatttctacaac

SEQ ID NO: 30260 - DNA, 48 bp, Emericella nidulans
gaattcactgcggccgccatggtctgagctcaccgatgaggactgggt

SEQ ID NO: 30261 - DNA, 49 bp, Emericella nidulans
gttctcgagacgagcgatcgcaattccataagtacaaacggctggggat

SEQ ID NO: 30262 - DNA, 45 bp, Emericella nidulans
gaattcactgcggccgccatgtccttttgtggttctgcctcttgc

SEQ ID NO: 30263 - DNA, 43 bp, Emericella nidulans
gttctcgagacgagcgatcgcttctcgagcgttgtgttgtccc

SEQ ID NO: 30264 - DNA, 49 bp, Emericella nidulans
gaattcactgcggccgccatgcaagcagaatatcgctacaacaagatgg

SEQ ID NO: 30265 - DNA, 45 bp, Emericella nidulans
gttctcgagacgagcgatcgcagattcccaaacccagcaaatgga

SEQ ID NO: 30266 - DNA, 40 bp, Emericella nidulans
gaattcactgcggccgccatgctcccccaactggtgtctc

SEQ ID NO: 30267 - DNA, 49 bp, Emericella nidulans
gttctcgagacgagcgatcgctattactattttaaaagagcataggacc

SEQ ID NO: 30268 - DNA, 44 bp, Emericella nidulans
gaattcactgcggccgccatgttgggactattctagtcatctgc

SEQ ID NO: 30269 - DNA, 41 bp, Emericella nidulans
gttctcgagacgagcgatcgcattacttcggtggtgcgatt

SEQ ID NO: 30270 - DNA, 41 bp, Emericella nidulans
gaattcactgcggccgccatgcgccgcccttctccagctct

SEQ ID NO: 30271 - DNA, 43 bp, Emericella nidulans
gttctcgagacgagcgatcgccatcagattctcggctccatcc

SEQ ID NO: 30272 - DNA, 49 bp, Emericella nidulans
gaattcactgcggccgccatgctattgtatctgagcctaagccaacacc

SEQ ID NO: 30273 - DNA, 42 bp, Emericella nidulans
gttctcgagacgagcgatcgcgcgacgacgacgagatgaggg

SEQ ID NO: 30274 - DNA, 46 bp, Emericella nidulans
gaattcactgcggccgccatgccagggcttacccctcctataatgc

SEQ ID NO: 30275 - DNA, 49 bp, Emericella nidulans
gttctcgagacgagcgatcgcttgacaaaaatgcacatatatcgcttgg

SEQ ID NO: 30276 - DNA, 49 bp, Emericella nidulans
gaattcactgcggccgccatgtggtagaaacatacaacattgggtctcg

SEQ ID NO: 30277 - DNA, 49 bp, Emericella nidulans
gttctcgagacgagcgatcgcccaagtacttcaactgccataactgaca

SEQ ID NO: 30278 - DNA, 41 bp, Emericella nidulans
gaattcactgcggccgccatgcgaccgtcgcctcaagtggg

SEQ ID NO: 30279 - DNA, 49 bp, Emericella nidulans
gttctcgagacgagcgatcgctaacaatggtttgctaactaacgccaag

SEQ ID NO: 30280 - DNA, 41 bp, Emericella nidulans
gaattcactgcggccgccatgaacgcgcccgtatccgatga

SEQ ID NO: 30281 - DNA, 49 bp, Emericella nidulans
gttctcgagacgagcgatcgcactgcttgcaattgctgtcattagactc

SEQ ID NO: 30282 - DNA, 48 bp, Emericella nidulans
gaattcactgcggccgccatgtggatctcagtcattgaccctcgcata

SEQ ID NO: 30283 - DNA, 49 bp, Emericella nidulans
gttctcgagacgagcgatcgctcaacttgctcgtattatcggacgctta

SEQ ID NO: 30284 - DNA, 41 bp, Emericella nidulans
gaattcactgcggccgccatgcggagaacaatagcggtagc

SEQ ID NO: 30285 - DNA, 41 bp, Emericella nidulans
gttctcgagacgagcgatcgcctagctcatgcaatcgtcca

SEQ ID NO: 30286 - DNA, 49 bp, Emericella nidulans
gaattcactgcggccgccatgagctgcatatattgattgtgtgaacgtg

SEQ ID NO: 30287 - DNA, 49 bp, Emericella nidulans
gttctcgagacgagcgatcgcatcatcttttcaagatgtgtatcgcacc

SEQ ID NO: 30288 - DNA, 42 bp, Emericella nidulans
gaattcactgcggccgccatgtggcagtgcggagaccagaga

SEQ ID NO: 30289 - DNA, 49 bp, Emericella nidulans
gttctcgagacgagcgatcgctgtatcaatattggatgtttgagcgaca

SEQ ID NO: 30290 - DNA, 43 bp, Emericella nidulans
gaattcactgcggccgccatgtcaaaccgtgagcctgggcaat

SEQ ID NO: 30291 - DNA, 49 bp, Emericella nidulans
gttctcgagacgagcgatcgccgctcgcgtaatagctagatacagtgct

SEQ ID NO: 30292 - DNA, 41 bp, Emericella nidulans
gaattcactgcggccgccatgaatgcgccaaaacacctatc

SEQ ID NO: 30293 - DNA, 41 bp, Emericella nidulans
gttctcgagacgagcgatcgctggttgctttgacgtctcac

SEQ ID NO: 30294 - DNA, 47 bp, Emericella nidulans
gaattcactgcggccgccatgtagcagaaggaatataaaaggtttcg

SEQ ID NO: 30295 - DNA, 39 bp, Emericella nidulans
gttctcgagacgagcgatcgcctcccgacgtatgagcct

SEQ ID NO: 30296 - DNA, 41 bp, Emericella nidulans
gaattcactgcggccgccatgacgcgtgtatctctatgcaa

SEQ ID NO: 30297 - DNA, 41 bp, Emericella nidulans
gttctcgagacgagcgatcgcggccgttagacccgaaatac

SEQ ID NO: 30298 - DNA, 41 bp, Emericella nidulans
gaattcactgcggccgccatgttgatggctttttaggcaat

SEQ ID NO: 30299 - DNA, 41 bp, Emericella nidulans
gttctcgagacgagcgatcgcgtttgaggggtttgagatgg

SEQ ID NO: 30300 - DNA, 44 bp, Emericella nidulans
gaattcactgcggccgccatgcgtaagtctagacaacctttcaa

SEQ ID NO: 30301 - DNA, 41 bp, Emericella nidulans
gttctcgagacgagcgatcgctctgcaagatttggttagcg

SEQ ID NO: 30302 - DNA, 41 bp, Emericella nidulans
gaattcactgcggccgccatggcgaatcccagctgttgtat

SEQ ID NO: 30303 - DNA, 44 bp, Emericella nidulans
gttctcgagacgagcgatcgcgatagctttggagaacacaagaa

SEQ ID NO: 30304 - DNA, 44 bp, Emericella nidulans
gaattcactgcggccgccatgtccagattcaagaaaagaaccaa

SEQ ID NO: 30305 - DNA, 43 bp, Emericella nidulans
gttctcgagacgagcgatcgccactcaaactactggctcttcg

SEQ ID NO: 30306 - DNA, 41 bp, Emericella nidulans
gaattcactgcggccgccatgataggcctgtcattgccaac

SEQ ID NO: 30307 - DNA, 39 bp, Emericella nidulans
gttctcgagacgagcgatcgccaagacctcccccgactg

SEQ ID NO: 30308 - DNA, 40 bp, Emericella nidulans
gaattcactgcggccgccatgtggcggcctttgtcgaagc

SEQ ID NO: 30309 - DNA, 41 bp, Emericella nidulans
gttctcgagacgagcgatcgcgagggaggcgctgacggaga

SEQ ID NO: 30310 - DNA, 51 bp, Emericella nidulans
gaattcactgcggccgccatggatatcaagctcgggatatatgaggaatga

SEQ ID NO: 30311 - DNA, 46 bp, Emericella nidulans
gttctcgagacgagcgatcgctgaatcctatcctggaggaatgcag

SEQ ID NO: 30312 - DNA, 46 bp, Emericella nidulans
gaattcactgcggccgccatggccataaaggagagaaggcaggcac

SEQ ID NO: 30313 - DNA, 41 bp, Emericella nidulans
gttctcgagacgagcgatcgcccgtcctttgcggcgatacc

SEQ ID NO: 30314 - DNA, 51 bp, Emericella nidulans
gaattcactgcggccgccatgatgaagtcggattggtagtagaggccatgt

SEQ ID NO: 30315 - DNA, 48 bp, Emericella nidulans
gttctcgagacgagcgatcgcacagcgtatgatatcctgagggccaag

SEQ ID NO: 30316 - DNA, 41 bp, Emericella nidulans
gaattcactgcggccgccatgtgtcgatggcatcgcctacc

SEQ ID NO: 30317 - DNA, 57 bp, Emericella nidulans
gttctcgagacgagcgatcgcataaggatagaaaaaggataggataatggacggctc

SEQ ID NO: 30318 - DNA, 47 bp, Emericella nidulans
gaattcactgcggccgccatggctgacttttatatccgatgctcagg

SEQ ID NO: 30319 - DNA, 42 bp, Emericella nidulans
gttctcgagacgagcgatcgcggtggaaggtctgggctgggt

SEQ ID NO: 30320 - DNA, 41 bp, Emericella nidulans
gaattcactgcggccgccatgtctgcgcctgagcacccaaa

SEQ ID NO: 30321 - DNA, 42 bp, Emericella nidulans
gttctcgagacgagcgatcgccgcaacatgtgatccgtgcag

SEQ ID NO: 30322 - DNA, 41 bp, Emericella nidulans
gaattcactgcggccgccatgtggatgggccgattgttggt

SEQ ID NO: 30323 - DNA, 41 bp, Emericella nidulans
gttctcgagacgagcgatcgcgcgcaacccgctcctaccag

SEQ ID NO: 30324 - DNA, 41 bp, Emericella nidulans
gaattcactgcggccgccatgggcgagcaatgggggagtca

SEQ ID NO: 30325 - DNA, 43 bp, Emericella nidulans
gttctcgagacgagcgatcgcgcccatggtaagcgggatttca

SEQ ID NO: 30326 - DNA, 41 bp, Emericella nidulans
gaattcactgcggccgccatgcaaccccggtcagccaggag

SEQ ID NO: 30327 - DNA, 41 bp, Emericella nidulans
gttctcgagacgagcgatcgcgccataaatgcccgccatcc

SEQ ID NO: 30328 - DNA, 41 bp, Emericella nidulans
gaattcactgcggccgccatggcacctaccgcccgggattt

SEQ ID NO: 30329 - DNA, 43 bp, Emericella nidulans
gttctcgagacgagcgatcgcccttccaagcccatgtgtgtcg

SEQ ID NO: 30330 - DNA, 46 bp, Emericella nidulans
gaattcactgcggccgccatggacggacatctaccacagaagaacg

SEQ ID NO: 30331 - DNA, 42 bp, Emericella nidulans
gttctcgagacgagcgatcgccgctcttgttggcgaggagca

SEQ ID NO: 30332 - DNA, 53 bp, Emericella nidulans
gaattcactgcggccgccatggcaagacatagcggtacagcatgtgtatgaat

SEQ ID NO: 30333 - DNA, 41 bp, Emericella nidulans
gttctcgagacgagcgatcgctgccggggttcaaggactgg

SEQ ID NO: 30334 - DNA, 46 bp, Emericella nidulans
gaattcactgcggccgccatgaatgaactccgacggcataataagg

SEQ ID NO: 30335 - DNA, 45 bp, Emericella nidulans
gttctcgagacgagcgatcgcccatggtatcctttcgggcaaagc

SEQ ID NO: 30336 - DNA, 57 bp, Emericella nidulans
gaattcactgcggccgccatgttgatatcaaattagctaagaaaacttagaaaggga

SEQ ID NO: 30337 - DNA, 45 bp, Emericella nidulans
gttctcgagacgagcgatcgccgcattcaatgccaataacgatgg

SEQ ID NO: 30338 - DNA, 52 bp, Emericella nidulans
gaattcactgcggccgccatgatgctgtgaatctgcatttatacacaacaag

SEQ ID NO: 30339 - DNA, 41 bp, Emericella nidulans
gttctcgagacgagcgatcgcctgcccccaaggtccaggct

SEQ ID NO: 30340 - DNA, 46 bp, Emericella nidulans
gaattcactgcggccgccatgcggcgactgtacaaaatcgtaccca

SEQ ID NO: 30341 - DNA, 47 bp, Emericella nidulans
gttctcgagacgagcgatcgctgaagtcggaatttactcatcatccc

SEQ ID NO: 30342 - DNA, 44 bp, Emericella nidulans
gaattcactgcggccgccatgggtcctcatcgacgaagccagtg

SEQ ID NO: 30343 - DNA, 43 bp, Emericella nidulans
gttctcgagacgagcgatcgctcccaatgccaaaatgacatcc

SEQ ID NO: 30344 - DNA, 41 bp, Emericella nidulans
gaattcactgcggccgccatggccggaccgggagatgttga

SEQ ID NO: 30345 - DNA, 41 bp, Emericella nidulans
gttctcgagacgagcgatcgccgcacgcatcgctagccctc

SEQ ID NO: 30346 - DNA, 47 bp, Emericella nidulans
gaattcactgcggccgccatggcggatataattgacacggcttgagg

SEQ ID NO: 30347 - DNA, 50 bp, Emericella nidulans
gttctcgagacgagcgatcgctcaccggtttgttaagaacggattagtgc

SEQ ID NO: 30348 - DNA, 42 bp, Emericella nidulans
gaattcactgcggccgccatggcaggactgctgggtggatgc

SEQ ID NO: 30349 - DNA, 42 bp, Emericella nidulans
gttctcgagacgagcgatcgccccgagagtgcgaaggcgaat

SEQ ID NO: 30350 - DNA, 43 bp, Emericella nidulans
gaattcactgcggccgccatgggcgtcatgaccggatccagaa

SEQ ID NO: 30351 - DNA, 42 bp, Emericella nidulans
gttctcgagacgagcgatcgcccccaaggcaaccctgtcctg

SEQ ID NO: 30352 - DNA, 51 bp, Emericella nidulans
gaattcactgcggccgccatgcttagatactgcctctctatcgccgccttg

SEQ ID NO: 30353 - DNA, 51 bp, Emericella nidulans
gttctcgagacgagcgatcgcgtaacggacccattactgttattgggatga

SEQ ID NO: 30354 - DNA, 44 bp, Emericella nidulans
gaattcactgcggccgccatgcggctaaggtcaaatccgatccc

SEQ ID NO: 30355 - DNA, 57 bp, Emericella nidulans
gttctcgagacgagcgatcgcttagatatgtccaataatagacgatatacccactca

SEQ ID NO: 30356 - DNA, 41 bp, Emericella nidulans
gaattcactgcggccgccatgccttccaaagcgctgggtgc

SEQ ID NO: 30357 - DNA, 57 bp, Emericella nidulans
gttctcgagacgagcgatcgcatctgttcttctaaatggcaagagttaaatataccg

SEQ ID NO: 30358 - DNA, 56 bp, Emericella nidulans
gaattcactgcggccgccatggaatgctggaatagactagcctttgtccacaggaa

SEQ ID NO: 30359 - DNA, 41 bp, Emericella nidulans
gttctcgagacgagcgatcgctgcccgagacatcccagcct

SEQ ID NO: 30360 - DNA, 43 bp, Emericella nidulans
gaattcactgcggccgccatggggctgaggctcaggtccagaa

SEQ ID NO: 30361 - DNA, 56 bp, Emericella nidulans; identical to SEQ ID NO: 28411

SEQ ID NO: 30362 - DNA, 41 bp, Emericella nidulans
gaattcactgcggccgccatgagacgcagaaggagatggag

SEQ ID NO: 30363 - DNA, 41 bp, Emericella nidulans
gttctcgagacgagcgatcgcaagattgtcgtttgcgtcgt

SEQ ID NO: 30364 - DNA, 41 bp, Emericella nidulans
gaattcactgcggccgccatgttactccagccgctgtttgt

SEQ ID NO: 30365 - DNA, 41 bp, Emericella nidulans
gttctcgagacgagcgatcgcgtgcccgttgctatttaagc

SEQ ID NO: 30366 - DNA, 41 bp, Emericella nidulans
gaattcactgcggccgccatgccactggaggtagtcctcac

SEQ ID NO: 30367 - DNA, 41 bp, Emericella nidulans
gttctcgagacgagcgatcgcgagcgtaacgacatggttca

SEQ ID NO: 30368 - DNA, 41 bp, Emericella nidulans
gaattcactgcggccgccatgccagaaccacagcgtaggat

SEQ ID NO: 30369 - DNA, 43 bp, Emericella nidulans
gttctcgagacgagcgatcgcgcagtatctcctcaacgaatca

SEQ ID NO: 30370 - DNA, 41 bp, Emericella nidulans
gaattcactgcggccgccatggttttggggtgaccactcag

SEQ ID NO: 30371 - DNA, 39 bp, Emericella nidulans
gttctcgagacgagcgatcgcggtaagcagctcgaggat

SEQ ID NO: 30372 - DNA, 46 bp, Emericella nidulans
gaattcactgcggccgccatgtccaaatgatgtacaatagaaatgc

SEQ ID NO: 30373 - DNA, 40 bp, Emericella nidulans
gttctcgagacgagcgatcgcggatcggccacaatgtctc

SEQ ID NO: 30374 - DNA, 49 bp, Emericella nidulans
gaattcactgcggccgccatgactcataatatatgctattttgggaaca

SEQ ID NO: 30375 - DNA, 41 bp, Emericella nidulans
gttctcgagacgagcgatcgctgatgccgacgtcttgacta

SEQ ID NO: 30376 - DNA, 41 bp, Emericella nidulans
gaattcactgcggccgccatgcgtacccgggatatttgaag

SEQ ID NO: 30377 - DNA, 41 bp, Emericella nidulans
gttctcgagacgagcgatcgcactccagcaaccttgtgtcc

SEQ ID NO: 30378 - DNA, 41 bp, Emericella nidulans
gaattcactgcggccgccatgttcactgcatttgcatcctc

SEQ ID NO: 30379 - DNA, 41 bp, Emericella nidulans
gttctcgagacgagcgatcgccagccgagacagacaagaca

SEQ ID NO: 30380 - DNA, 41 bp, Emericella nidulans
gaattcactgcggccgccatgtcgactgcatttagcacgac

SEQ ID NO: 30381 - DNA, 41 bp, Emericella nidulans
gttctcgagacgagcgatcgcgtggcttggcattctctttc

SEQ ID NO: 30382 - DNA, 41 bp, Emericella nidulans
gaattcactgcggccgccatgggaaagcgatggataaagga

SEQ ID NO: 30383 - DNA, 41 bp, Emericella nidulans
gttctcgagacgagcgatcgccgccgcagcatatcttatct

SEQ ID NO: 30384 - DNA, 41 bp, Emericella nidulans
gaattcactgcggccgccatgatcggccagatttgttcttg

SEQ ID NO: 30385 - DNA, 50 bp, Emericella nidulans
gttctcgagacgagcgatcgccttttacgattattattattgaagacttg

SEQ ID NO: 30386 - DNA, 41 bp, Emericella nidulans
gaattcactgcggccgccatggtcaaatttgcggcgttatt

SEQ ID NO: 30387 - DNA, 41 bp, Emericella nidulans
gttctcgagacgagcgatcgccacgaaaataaccacgagcc

SEQ ID NO: 30388 - DNA, 44 bp, Emericella nidulans
gaattcactgcggccgccatgctgacaccacagaaagataacga

SEQ ID NO: 30389 - DNA, 41 bp, Emericella nidulans
gttctcgagacgagcgatcgcgttttctttcccccgaagac

SEQ ID NO: 30390 - DNA, 41 bp, Emericella nidulans
gaattcactgcggccgccatgtgattgctacgccgaatgta

SEQ ID NO: 30391 - DNA, 41 bp, Emericella nidulans
gttctcgagacgagcgatcgcattcactcaccactgccaca

SEQ ID NO: 30392 - DNA, 44 bp, Emericella nidulans
gaattcactgcggccgccatgcagatcaaggaattagcttggag

SEQ ID NO: 30393 - DNA, 54 bp, Emericella nidulans
gttctcgagacgagcgatcgctctctatattcttattttatacttgctatatcc

SEQ ID NO: 30394 - DNA, 42 bp, Emericella nidulans
gaattcactgcggccgccatgcatagctcgggagcttaggtt

SEQ ID NO: 30395 - DNA, 41 bp, Emericella nidulans
gttctcgagacgagcgatcgcgaagaagcgctgttgaatcc

SEQ ID NO: 30396 - DNA, 42 bp, Emericella nidulans
gaattcactgcggccgccatggccatggacacatctggtact

SEQ ID NO: 30397 - DNA, 43 bp, Emericella nidulans
gttctcgagacgagcgatcgctccttggctatgagtatgacca

SEQ ID NO: 30398 - DNA, 44 bp, Emericella nidulans
gaattcactgcggccgccatgcaggtatcagagatctgcttcag

SEQ ID NO: 30399 - DNA, 41 bp, Emericella nidulans
gttctcgagacgagcgatcgccccatttcatttcagggcta

SEQ ID NO: 30400 - DNA, 41 bp, Emericella nidulans
gaattcactgcggccgccatggccgaaacgaaaagtcaaga

SEQ ID NO: 30401 - DNA, 41 bp, Emericella nidulans
gttctcgagacgagcgatcgcgactcgattagccaggttgg

SEQ ID NO: 30402 - DNA, 41 bp, Emericella nidulans
gaattcactgcggccgccatgggatgaaaggctggcaataa

SEQ ID NO: 30403 - DNA, 41 bp, Emericella nidulans
gttctcgagacgagcgatcgctgttcttttccgttcaaaac

SEQ ID NO: 30404 - DNA, 41 bp, Emericella nidulans
gaattcactgcggccgccatgacggagtgcttggtacgttg

SEQ ID NO: 30405 - DNA, 43 bp, Emericella nidulans
gttctcgagacgagcgatcgccgaacgagagtctagttcagga

SEQ ID NO: 30406 - DNA, 41 bp, Emericella nidulans
gaattcactgcggccgccatgttgcagctatcctctccctc

SEQ ID NO: 30407 - DNA, 41 bp, Emericella nidulans
gttctcgagacgagcgatcgcaggctcgatgctcacaatct

SEQ ID NO: 30408 - DNA, 48 bp, Emericella nidulans
gaattcactgcggccgccatgcatttaaccattgttcataatttaagg

SEQ ID NO: 30409 - DNA, 41 bp, Emericella nidulans
gttctcgagacgagcgatcgctgccttgctgaggagcttat

SEQ ID NO: 30410 - DNA, 43 bp, Emericella nidulans
gaattcactgcggccgccatgccaaatcaactgaagcttacga

SEQ ID NO: 30411 - DNA, 41 bp, Emericella nidulans
gttctcgagacgagcgatcgcctcagtgatgcaacgcttgt

SEQ ID NO: 30412 - DNA, 41 bp, Emericella nidulans
gaattcactgcggccgccatggctacgggatcggatatcaa

SEQ ID NO: 30413 - DNA, 41 bp, Emericella nidulans
gttctcgagacgagcgatcgcccagagatccaaagaacgtc

SEQ ID NO: 30414 - DNA, 48 bp, Emericella nidulans
gaattcactgcggccgccatgagtatgctacaatgacataattgcttt

SEQ ID NO: 30415 - DNA, 41 bp, Emericella nidulans
gttctcgagacgagcgatcgcatacgaccgaaggagatgga

SEQ ID NO: 30416 - DNA, 41 bp, Emericella nidulans
gaattcactgcggccgccatgtagcttcaatcgcctaccgt

SEQ ID NO: 30417 - DNA, 41 bp, Emericella nidulans
gttctcgagacgagcgatcgcagacaaccagccagacaagc

SEQ ID NO: 30418 - DNA, 41 bp, Emericella nidulans
gaattcactgcggccgccatgggcttcgtgactcctgacat

SEQ ID NO: 30419 - DNA, 45 bp, Emericella nidulans
gttctcgagacgagcgatcgcaacgaatttgttatttagcttttt

SEQ ID NO: 30420 - DNA, 41 bp, Emericella nidulans
gaattcactgcggccgccatgagaggccttagccagctgtt

SEQ ID NO: 30421 - DNA, 41 bp, Emericella nidulans
gttctcgagacgagcgatcgccttaagcctttgcacggtgt

SEQ ID NO: 30422 - DNA, 41 bp, Emericella nidulans
gaattcactgcggccgccatgtcggtgatctcaagctcctt

SEQ ID NO: 30423 - DNA, 42 bp, Emericella nidulans
gttctcgagacgagcgatcgctggagggaatgtttcagtgat

SEQ ID NO: 30424 - DNA, 41 bp, Emericella nidulans; identical to SEQ ID NO: 28646

SEQ ID NO: 30425 - DNA, 44 bp, Emericella nidulans; identical to SEQ ID NO: 28649

SEQ ID NO: 30426 - DNA, 41 bp, Emericella nidulans; identical to SEQ ID NO: 28662

SEQ ID NO: 30427 - DNA, 50 bp, Emericella nidulans; identical to SEQ ID NO: 28663

SEQ ID NO: 30428 - DNA, 41 bp, Emericella nidulans
gaattcactgcggccgccatgaatcgcttttcccattcaga

SEQ ID NO: 30429 - DNA, 41 bp, Emericella nidulans; identical to SEQ ID NO: 28747

SEQ ID NO: 30430 - DNA, 50 bp, Emericella nidulans
gaattcactgcggccgccatgccgtatacgaaaaagctggctactactgg

SEQ ID NO: 30431 - DNA, 44 bp, Emericella nidulans
gttctcgagacgagcgatcgcggtgtcttccaggttggcgcgta

SEQ ID NO: 30432 - DNA, 43 bp, Emericella nidulans
gaattcactgcggccgccatgcgtcagtccgcagaccgatcct

SEQ ID NO: 30433 - DNA, 43 bp, Emericella nidulans
gttctcgagacgagcgatcgctccaataccttggttggggtga

SEQ ID NO: 30434 - DNA, 43 bp, Emericella nidulans
gaattcactgcggccgccatgcccatccagaagccaagaccgt

SEQ ID NO: 30435 - DNA, 41 bp, Emericella nidulans
gttctcgagacgagcgatcgcctgccctggcgacattcgtg

SEQ ID NO: 30436 - DNA, 41 bp, Emericella nidulans
gaattcactgcggccgccatggtggctgcggggcagttgat

SEQ ID NO: 30437 - DNA, 41 bp, Emericella nidulans
gttctcgagacgagcgatcgcggtctcggccgtgagcttgg

SEQ ID NO: 30438 - DNA, 48 bp, Emericella nidulans
gaattcactgcggccgccatggcacataaagcaacaatcgtgaagcct

SEQ ID NO: 30439 - DNA, 41 bp, Emericella nidulans
gttctcgagacgagcgatcgccaacgagagcccggagggtg

SEQ ID NO: 30440 - DNA, 41 bp, Emericella nidulans
gaattcactgcggccgccatgttgagcagacggcgcgtgtt

SEQ ID NO: 30441 - DNA, 41 bp, Emericella nidulans
gttctcgagacgagcgatcgctgctgtggtggtgcagttga

SEQ ID NO: 30442 - DNA, 46 bp, Emericella nidulans
gaattcactgcggccgccatgcctttatgctcgcttcctcgtgtca

SEQ ID NO: 30443 - DNA, 41 bp, Emericella nidulans
gttctcgagacgagcgatcgcggcgtcgtgacgagcgtgag

SEQ ID NO: 30444 - DNA, 41 bp, Emericella nidulans
gaattcactgcggccgccatgtcccctgctgcattgcatgg

SEQ ID NO: 30445 - DNA, 46 bp, Emericella nidulans
gttctcgagacgagcgatcgccgcctatatacgggagggaaggagg

SEQ ID NO: 30446 - DNA, 57 bp, Emericella nidulans
gaattcactgcggccgccatgttaggcggacttgttcttacttattgagagctaatg

SEQ ID NO: 30447 - DNA, 41 bp, Emericella nidulans
gttctcgagacgagcgatcgctccttcggcattccatcgac

SEQ ID NO: 30448 - DNA, 41 bp, Emericella nidulans
gaattcactgcggccgccatgtgggccagccatcaagttca

SEQ ID NO: 30449 - DNA, 42 bp, Emericella nidulans
gttctcgagacgagcgatcgcccgatgaggacatgggcttcg

SEQ ID NO: 30450 - DNA, 41 bp, Emericella nidulans
gaattcactgcggccgccatgtcgaccggcaaccgcttttc

SEQ ID NO: 30451 - DNA, 41 bp, Emericella nidulans
gttctcgagacgagcgatcgctggcgttcgttgctgcggta

SEQ ID NO: 30452 - DNA, 41 bp, Emericella nidulans
gaattcactgcggccgccatgccgccgcgaagcaatgaact

SEQ ID NO: 30453 - DNA, 41 bp, Emericella nidulans
gttctcgagacgagcgatcgcttgcagcatggcgttggagc

SEQ ID NO: 30454 - DNA, 41 bp, Emericella nidulans
gaattcactgcggccgccatggcgcggggtgaagccttctt

SEQ ID NO: 30455 - DNA, 41 bp, Emericella nidulans
gttctcgagacgagcgatcgcgggccgaagtccagggtcgt

SEQ ID NO: 30456 - DNA, 46 bp, Emericella nidulans
gaattcactgcggccgccatggcaccaaacacggaatattctcaaa

SEQ ID NO: 30457 - DNA, 48 bp, Emericella nidulans
gttctcgagacgagcgatcgccacctcctcatgcttgatacccctaca

SEQ ID NO: 30458 - DNA, 41 bp, Emericella nidulans
gaattcactgcggccgccatgtttttcgcggcgggttgttg

SEQ ID NO: 30459 - DNA, 42 bp, Emericella nidulans
gttctcgagacgagcgatcgctgctggggaatgaaggcgaat

SEQ ID NO: 30460 - DNA, 41 bp, Emericella nidulans
gaattcactgcggccgccatggtggggaggaatggggtggg

SEQ ID NO: 30461 - DNA, 41 bp, Emericella nidulans
gttctcgagacgagcgatcgctacatgttcgcccgccgcta

SEQ ID NO: 30462 - DNA, 41 bp, Emericella nidulans
gaattcactgcggccgccatggggcaaccgctacgccatgt

SEQ ID NO: 30463 - DNA, 43 bp, Emericella nidulans
gttctcgagacgagcgatcgctgctgaagaagacgcggaacca

SEQ ID NO: 30464 - DNA, 42 bp, Emericella nidulans
gaattcactgcggccgccatgcccccacacagaaaccggtga

SEQ ID NO: 30465 - DNA, 45 bp, Emericella nidulans
gttctcgagacgagcgatcgctccaccttccgaaataccagcacc

SEQ ID NO: 30466 - DNA, 41 bp, Emericella nidulans
gaattcactgcggccgccatgcgagcggatgcgggaaatga

SEQ ID NO: 30467 - DNA, 42 bp, Emericella nidulans
gttctcgagacgagcgatcgccgtgcctcttgccctccaagg

SEQ ID NO: 30468 - DNA, 41 bp, Emericella nidulans
gaattcactgcggccgccatgtggtccgatgcgccggtact

SEQ ID NO: 30469 - DNA, 41 bp, Emericella nidulans
gttctcgagacgagcgatcgcggcagcgggcgttgaggata

SEQ ID NO: 30470 - DNA, 53 bp, Emericella nidulans
gaattcactgcggccgccatgtttttgagcaattcagaatgagttgcctactg

SEQ ID NO: 30471 - DNA, 41 bp, Emericella nidulans
gttctcgagacgagcgatcgcggcggaaggaatgccagcaa

SEQ ID NO: 30472 - DNA, 41 bp, Emericella nidulans
gaattcactgcggccgccatgcgggcttgacgcgctttgac

SEQ ID NO: 30473 - DNA, 42 bp, Emericella nidulans
gttctcgagacgagcgatcgctgctggccgggctagctccta

SEQ ID NO: 30474 - DNA, 42 bp, Emericella nidulans
gaattcactgcggccgccatgccctgccggtgactgagaccc

SEQ ID NO: 30475 - DNA, 41 bp, Emericella nidulans
gttctcgagacgagcgatcgccccgtgctgggagccttgag

SEQ ID NO: 30476 - DNA, 41 bp, Emericella nidulans
gaattcactgcggccgccatgggcccgagctatgcgagcct

SEQ ID NO: 30477 - DNA, 49 bp, Emericella nidulans
gttctcgagacgagcgatcgcagtttggtgagcactttcgatacatttt

SEQ ID NO: 30478 - DNA, 41 bp, Emericella nidulans
gaattcactgcggccgccatgcatgcactgctcccgaacaa

SEQ ID NO: 30479 - DNA, 41 bp, Emericella nidulans
gttctcgagacgagcgatcgctggctttccaagggggaggg

SEQ ID NO: 30480 - DNA, 57 bp, Emericella nidulans
gaattcactgcggccgccatgattgtttacattgtatacagtggattgcttacagaa

SEQ ID NO: 30481 - DNA, 42 bp, Emericella nidulans
gttctcgagacgagcgatcgctggctaagacggccaacagca

SEQ ID NO: 30482 - DNA, 50 bp, Emericella nidulans
gaattcactgcggccgccatgtttttgtcaaattcctcgactatcctcca

SEQ ID NO: 30483 - DNA, 42 bp, Emericella nidulans
gttctcgagacgagcgatcgctccccaggacaacaggcctcc

SEQ ID NO: 30484 - DNA, 41 bp, Emericella nidulans
gaattcactgcggccgccatgcggctcgcggggaacataga

SEQ ID NO: 30485 - DNA, 42 bp, Emericella nidulans
gttctcgagacgagcgatcgcgcctaagcccgcaagtgtgga

SEQ ID NO: 30486 - DNA, 55 bp, Emericella nidulans
gaattcactgcggccgccatgtgaggtattatcagtctaggtaccatcctcacca

SEQ ID NO: 30487 - DNA, 43 bp, Emericella nidulans
gttctcgagacgagcgatcgccttacccaccgagcagccaagc

SEQ ID NO: 30488 - DNA, 47 bp, Emericella nidulans
gaattcactgcggccgccatgtatcagcatgcaaccatggggttaga

SEQ ID NO: 30489 - DNA, 44 bp, Emericella nidulans
gttctcgagacgagcgatcgcgccgagtcatttatccccgaacg

SEQ ID NO: 30490 - DNA, 41 bp, Emericella nidulans
gaattcactgcggccgccatgtggcgtctcctgggtggagc

SEQ ID NO: 30491 - DNA, 41 bp, Emericella nidulans
gttctcgagacgagcgatcgcttgcaaccccatccgccaag

SEQ ID NO: 30492 - DNA, 44 bp, Emericella nidulans
gaattcactgcggccgccatgtgatgccagcctctgaagacagc

SEQ ID NO: 30493 - DNA, 41 bp, Emericella nidulans
gttctcgagacgagcgatcgcggccgccttcctgtcgtgaa

SEQ ID NO: 30494 - DNA, 43 bp, Emericella nidulans
gaattcactgcggccgccatggcagccaatgggctgaaaacca

SEQ ID NO: 30495 - DNA, 42 bp, Emericella nidulans
gttctcgagacgagcgatcgcggggcaccaacctgatgctga

SEQ ID NO: 30496 - DNA, 44 bp, Emericella nidulans
gaattcactgcggccgccatggcatttggcgtaatgcccatcaa

SEQ ID NO: 30497 - DNA, 44 bp, Emericella nidulans
gttctcgagacgagcgatcgctgtgcatttggtgatctggtttg

SEQ ID NO: 30498 - DNA, 41 bp, Emericella nidulans
gaattcactgcggccgccatgggctcgcaacctgggcaatc

SEQ ID NO: 30499 - DNA, 41 bp, Emericella nidulans
gttctcgagacgagcgatcgcgcaaggagcaagcgggggtt

SEQ ID NO: 30500 - DNA, 41 bp, Emericella nidulans
gaattcactgcggccgccatgggcatgcttgccaacactgg

SEQ ID NO: 30501 - DNA, 43 bp, Emericella nidulans
gttctcgagacgagcgatcgctcgaccctcctcgatcgacaca

SEQ ID NO: 30502 - DNA, 42 bp, Emericella nidulans
gaattcactgcggccgccatggcgacacgggtttctggcaaa

SEQ ID NO: 30503 - DNA, 44 bp, Emericella nidulans
gttctcgagacgagcgatcgctgggcacatgagcttcatggaat

SEQ ID NO: 30504 - DNA, 48 bp, Emericella nidulans
gaattcactgcggccgccatgctggtttcactcttgtaccgtgcacta

SEQ ID NO: 30505 - DNA, 41 bp, Emericella nidulans
gttctcgagacgagcgatcgcataacgcccgtcggcgcatc

SEQ ID NO: 30506 - DNA, 41 bp, Emericella nidulans
gaattcactgcggccgccatggtccgacattccgcgacggt

SEQ ID NO: 30507 - DNA, 54 bp, Emericella nidulans; identical to SEQ ID NO: 29007

SEQ ID NO: 30508 - DNA, 41 bp, Emericella nidulans
gaattcactgcggccgccatgttgcgtccgggtccaacgat

SEQ ID NO: 30509 - DNA, 45 bp, Emericella nidulans
gttctcgagacgagcgatcgcgcgggtgtggtacgtaccaggttt

SEQ ID NO: 30510 - DNA, 42 bp, Emericella nidulans
gaattcactgcggccgccatgtgacgcttcttgcgtcgtgga

SEQ ID NO: 30511 - DNA, 41 bp, Emericella nidulans
gttctcgagacgagcgatcgcacccgccgcttcccaaagaa

SEQ ID NO: 30512 - DNA, 41 bp, Emericella nidulans
gaattcactgcggccgccatggccagcttcgagcctggtcc

SEQ ID NO: 30513 - DNA, 42 bp, Emericella nidulans
gttctcgagacgagcgatcgccgtgggaattgcactcgtggc

SEQ ID NO: 30514 - DNA, 43 bp, Emericella nidulans
gaattcactgcggccgccatgggcgtgggagacgctatctgga

SEQ ID NO: 30515 - DNA, 44 bp, Emericella nidulans
gttctcgagacgagcgatcgccccagatgtgatctggggtctgc

SEQ ID NO: 30516 - DNA, 47 bp, Emericella nidulans
gaattcactgcggccgccatgtatgaatggcttattcaccaggggat

SEQ ID NO: 30517 - DNA, 41 bp, Emericella nidulans
gttctcgagacgagcgatcgcgttggcacggcgatgtctcg

SEQ ID NO: 30518 - DNA, 48 bp, Emericella nidulans
gaattcactgcggccgccatgtttgtcctgaagtgctcttgatgggag

SEQ ID NO: 30519 - DNA, 46 bp, Emericella nidulans
gttctcgagacgagcgatcgccgaacaggaacacgaaggattgtcc

SEQ ID NO: 30520 - DNA, 52 bp, Emericella nidulans
gaattcactgcggccgccatgtctctacatgatacccatcgtccttagtatg

SEQ ID NO: 30521 - DNA, 41 bp, Emericella nidulans
gttctcgagacgagcgatcgcggcggattcaccccggaaag

SEQ ID NO: 30522 - DNA, 53 bp, Emericella nidulans
gaattcactgcggccgccatgaacccccttgtagaaatgcaagtatatgttga

SEQ ID NO: 30523 - DNA, 41 bp, Emericella nidulans
gttctcgagacgagcgatcgccatcgccccggccgatgtat

SEQ ID NO: 30524 - DNA, 39 bp, Emericella nidulans
gaattcactgcggccgccatgcacgttcgccgcctgcaa

SEQ ID NO: 30525 - DNA, 48 bp, Emericella nidulans
gttctcgagacgagcgatcgcgcaactatccttctgctaccggtcgat

SEQ ID NO: 30526 - DNA, 41 bp, Emericella nidulans
gaattcactgcggccgccatgcgtcggcgagagggatgagc

SEQ ID NO: 30527 - DNA, 44 bp, Emericella nidulans
gttctcgagacgagcgatcgccgccccactactgaccagcccta

SEQ ID NO: 30528 - DNA, 41 bp, Emericella nidulans
gaattcactgcggccgccatggctgacggcgaggatcaagg

SEQ ID NO: 30529 - DNA, 41 bp, Emericella nidulans
gttctcgagacgagcgatcgcactttgcgcagggcgagcag

SEQ ID NO: 30530 - DNA, 47 bp, Emericella nidulans
gaattcactgcggccgccatgccaagccaggcagataactctacaag

SEQ ID NO: 30531 - DNA, 41 bp, Emericella nidulans
gttctcgagacgagcgatcgcgcgcgctctggtcattgcat

SEQ ID NO: 30532 - DNA, 43 bp, Emericella nidulans
gaattcactgcggccgccatggcctccgttgccgcctagtctt

SEQ ID NO: 30533 - DNA, 41 bp, Emericella nidulans
gttctcgagacgagcgatcgccatcgccgatgccgagactg

SEQ ID NO: 30534 - DNA, 41 bp, Emericella nidulans
gaattcactgcggccgccatgtggaggaaagcagcggagcc

SEQ ID NO: 30535 - DNA, 41 bp, Emericella nidulans
gttctcgagacgagcgatcgccggcacaggaccgggcaact

SEQ ID NO: 30536 - DNA, 41 bp, Emericella nidulans
gaattcactgcggccgccatggggcggcgtttctggcgata

SEQ ID NO: 30537 - DNA, 41 bp, Emericella nidulans
gttctcgagacgagcgatcgcatccaccacgcccgtgtcct

SEQ ID NO: 30538 - DNA, 49 bp, Emericella nidulans
gaattcactgcggccgccatgcatgaagaggcaaatacaggatagttgg

SEQ ID NO: 30539 - DNA, 41 bp, Emericella nidulans
gttctcgagacgagcgatcgcccgcggattcgcctggtttt

SEQ ID NO: 30540 - DNA, 41 bp, Emericella nidulans
gaattcactgcggccgccatggccattcctgtccgcgcagt

SEQ ID NO: 30541 - DNA, 41 bp, Emericella nidulans
gttctcgagacgagcgatcgcccgcgacgggtcgtctatcg

SEQ ID NO: 30542 - DNA, 52 bp, Emericella nidulans
gaattcactgcggccgccatggaaatgtcgataaatggagggctattataca

SEQ ID NO: 30543 - DNA, 41 bp, Emericella nidulans
gttctcgagacgagcgatcgccgcgagccggcttacaagga

SEQ ID NO: 30544 - DNA, 41 bp, Emericella nidulans
gaattcactgcggccgccatgagacgaggcgccagcagacc

SEQ ID NO: 30545 - DNA, 42 bp, Emericella nidulans
gttctcgagacgagcgatcgcgatggtggtcccgaacgcaga

SEQ ID NO: 30546 - DNA, 41 bp, Emericella nidulans
gaattcactgcggccgccatgagcgctgctgggaacgaacg

SEQ ID NO: 30547 - DNA, 41 bp, Emericella nidulans
gttctcgagacgagcgatcgcaaacgcccgggactgcgtta

SEQ ID NO: 30548 - DNA, 42 bp, Emericella nidulans
gaattcactgcggccgccatgtgtggcaaaaggaccccgaga

SEQ ID NO: 30549 - DNA, 48 bp, Emericella nidulans
gttctcgagacgagcgatcgcgtatggcaaaaccctcaagcaacatca

SEQ ID NO: 30550 - DNA, 56 bp, Emericella nidulans
gaattcactgcggccgccatgaaatattgaaatctacagaattcaggcacttatgg

SEQ ID NO: 30551 - DNA, 41 bp, Emericella nidulans
gttctcgagacgagcgatcgcggcgaccaattggccgaaga

SEQ ID NO: 30552 - DNA, 42 bp, Emericella nidulans
gaattcactgcggccgccatgcgccaccatgtggtcccagag

SEQ ID NO: 30553 - DNA, 52 bp, Emericella nidulans
gttctcgagacgagcgatcgctggttgagtatgtccgaaagatactgaggct

SEQ ID NO: 30554 - DNA, 41 bp, Emericella nidulans
gaattcactgcggccgccatgtctgggcgctggcatgaaga

SEQ ID NO: 30555 - DNA, 46 bp, Emericella nidulans
gttctcgagacgagcgatcgcgcgatcaactgtcagtcaggcatca

SEQ ID NO: 30556 - DNA, 53 bp, Emericella nidulans
gaattcactgcggccgccatgtacagccttgaataattcttactcgctggtat

SEQ ID NO: 30557 - DNA, 41 bp, Emericella nidulans
gttctcgagacgagcgatcgctgatgacgagggcgctgctg

SEQ ID NO: 30558 - DNA, 45 bp, Emericella nidulans
gaattcactgcggccgccatggctcttgcacggacactcttgacc

SEQ ID NO: 30559 - DNA, 54 bp, Emericella nidulans
gttctcgagacgagcgatcgcgatctgctctatcatacgtatcggagtgcttgg

SEQ ID NO: 30560 - DNA, 45 bp, Emericella nidulans
gaattcactgcggccgccatgtgacagctgtcgacaggcattttt

SEQ ID NO: 30561 - DNA, 43 bp, Emericella nidulans
gttctcgagacgagcgatcgcggaaatggctgaggaacgcaca

SEQ ID NO: 30562 - DNA, 47 bp, Emericella nidulans
gaattcactgcggccgccatgctttgtagcttctgtgcgcaccttga

SEQ ID NO: 30563 - DNA, 43 bp, Emericella nidulans
gttctcgagacgagcgatcgcgccctgctgtgaggtctgttgc

SEQ ID NO: 30564 - DNA, 42 bp, Emericella nidulans
gaattcactgcggccgccatgtggagtttgcgcccaacaacg

SEQ ID NO: 30565 - DNA, 43 bp, Emericella nidulans
gttctcgagacgagcgatcgcgcagctgtcgaaggagcccaag

SEQ ID NO: 30566 - DNA, 42 bp, Emericella nidulans
gaattcactgcggccgccatgtgcgcgagcatctgactacga

SEQ ID NO: 30567 - DNA, 52 bp, Emericella nidulans
gttctcgagacgagcgatcgcgaatacacccctggaagtgttttgcaaaggt

SEQ ID NO: 30568 - DNA, 44 bp, Emericella nidulans
gaattcactgcggccgccatgtcctccagacactgccagcgatt

SEQ ID NO: 30569 - DNA, 49 bp, Emericella nidulans
gttctcgagacgagcgatcgcgaaagcctctaggaccagttcttttcca

SEQ ID NO: 30570 - DNA, 41 bp, Emericella nidulans
gaattcactgcggccgccatggcgttgggcggcgtcaatac

SEQ ID NO: 30571 - DNA, 41 bp, Emericella nidulans
gttctcgagacgagcgatcgcgaaaccaaaacgcccccaaa

SEQ ID NO: 30572 - DNA, 42 bp, Emericella nidulans
gaattcactgcggccgccatgtggtgcgtgaaacccggtaca

SEQ ID NO: 30573 - DNA, 41 bp, Emericella nidulans
gttctcgagacgagcgatcgcttctcccacgcccagaccgt

SEQ ID NO: 30574 - DNA, 49 bp, Emericella nidulans
gaattcactgcggccgccatgaaaaagtgagcgcaagtcattgatttat

SEQ ID NO: 30575 - DNA, 42 bp, Emericella nidulans
gttctcgagacgagcgatcgctcgagcttggagagcgcacct

SEQ ID NO: 30576 - DNA, 50 bp, Emericella nidulans
gaattcactgcggccgccatgagggtgctgtatcgacaattgcatactta

SEQ ID NO: 30577 - DNA, 46 bp, Emericella nidulans
gttctcgagacgagcgatcgctgcgactccaaatctgaagagacga

SEQ ID NO: 30578 - DNA, 44 bp, Emericella nidulans
gaattcactgcggccgccatgcgacatttgagagctcgcgccta

SEQ ID NO: 30579 - DNA, 45 bp, Emericella nidulans
gttctcgagacgagcgatcgccagaatctggatatgggccggagt

SEQ ID NO: 30580 - DNA, 42 bp, Emericella nidulans
gaattcactgcggccgccatgcccgcaatcttcgagcaatcg

SEQ ID NO: 30581 - DNA, 43 bp, Emericella nidulans
gttctcgagacgagcgatcgcgcaggcggataggaaaccagga

SEQ ID NO: 30582 - DNA, 51 bp, Emericella nidulans
gaattcactgcggccgccatggttacggttagaagcctcaaggtgatagga

SEQ ID NO: 30583 - DNA, 42 bp, Emericella nidulans
gttctcgagacgagcgatcgcggctgcaggtagctgggttcg

SEQ ID NO: 30584 - DNA, 57 bp, Emericella nidulans
gaattcactgcggccgccatgaatatagtagattaactacacctgccattgagatcc

SEQ ID NO: 30585 - DNA, 45 bp, Emericella nidulans
gttctcgagacgagcgatcgccccaagcagaccaggttcccattt

SEQ ID NO: 30586 - DNA, 45 bp, Emericella nidulans
gaattcactgcggccgccatgtccttcaacggcatccttctaccg

SEQ ID NO: 30587 - DNA, 41 bp, Emericella nidulans
gttctcgagacgagcgatcgccggcccggaagggagtgttg

SEQ ID NO: 30588 - DNA, 50 bp, Emericella nidulans
gaattcactgcggccgccatgtaattggttttcgtctatccgtcacttgt

SEQ ID NO: 30589 - DNA, 41 bp, Emericella nidulans
gttctcgagacgagcgatcgccgctgtgacgcatgggatgg

SEQ ID NO: 30590 - DNA, 41 bp, Emericella nidulans
gaattcactgcggccgccatgtctggccgaaaggcgaggaa

SEQ ID NO: 30591 - DNA, 48 bp, Emericella nidulans
gttctcgagacgagcgatcgccctttacttccttacattgcgcgtttc

SEQ ID NO: 30592 - DNA, 55 bp, Emericella nidulans
gaattcactgcggccgccatgaatacttcatccccggagatggtattagccgaga

SEQ ID NO: 30593 - DNA, 43 bp, Emericella nidulans
gttctcgagacgagcgatcgctgggacatttcagggtgcatgg

SEQ ID NO: 30594 - DNA, 41 bp, Emericella nidulans
gaattcactgcggccgccatgtcccggggtatcgtcggtct

SEQ ID NO: 30595 - DNA, 42 bp, Emericella nidulans
gttctcgagacgagcgatcgcgcacaaggaatccccgcaagc

SEQ ID NO: 30596 - DNA, 41 bp, Emericella nidulans
gaattcactgcggccgccatggaaacccaccgggggaatga

SEQ ID NO: 30597 - DNA, 49 bp, Emericella nidulans
gttctcgagacgagcgatcgcagtgatttcagtttgagcgagttgtgtc

SEQ ID NO: 30598 - DNA, 41 bp, Emericella nidulans
gaattcactgcggccgccatggccttcgctgctggaggagg

SEQ ID NO: 30599 - DNA, 43 bp, Emericella nidulans
gttctcgagacgagcgatcgcgctcagaacggccacttcacca

SEQ ID NO: 30600 - DNA, 41 bp, Emericella nidulans
gaattcactgcggccgccatggacgggcaatcacgccgttc

SEQ ID NO: 30601 - DNA, 42 bp, Emericella nidulans
gttctcgagacgagcgatcgcggaacggccggtacgatcctg

SEQ ID NO: 30602 - DNA, 45 bp, Emericella nidulans
gaattcactgcggccgccatgggattggttcatgctcgacttgtt

SEQ ID NO: 30603 - DNA, 42 bp, Emericella nidulans
gttctcgagacgagcgatcgctggaaggcaggcatcaaggct

SEQ ID NO: 30604 - DNA, 54 bp, Emericella nidulans
gaattcactgcggccgccatggattgcttaatcagttcccgtaaaatgttctca

SEQ ID NO: 30605 - DNA, 41 bp, Emericella nidulans
gttctcgagacgagcgatcgccaagggcgaggcgatcgaaa

SEQ ID NO: 30606 - DNA, 52 bp, Emericella nidulans
gaattcactgcggccgccatgagttctatccagtaaagctttcatgatttcg

SEQ ID NO: 30607 - DNA, 41 bp, Emericella nidulans
gttctcgagacgagcgatcgcccggaccctgccctgagaga

SEQ ID NO: 30608 - DNA, 46 bp, Emericella nidulans
gaattcactgcggccgccatgcgggtacggaatgattccaaacgaa

SEQ ID NO: 30609 - DNA, 41 bp, Emericella nidulans
gttctcgagacgagcgatcgcccccatttcccgcctgccta

SEQ ID NO: 30610 - DNA, 44 bp, Emericella nidulans
gaattcactgcggccgccatgggcaattcatggttcggttgaga

SEQ ID NO: 30611 - DNA, 45 bp, Emericella nidulans
gttctcgagacgagcgatcgctcgacgagatctaaccgctgctcc

SEQ ID NO: 30612 - DNA, 41 bp, Emericella nidulans
gaattcactgcggccgccatgcgagtgctcgcacgagaggc

SEQ ID NO: 30613 - DNA, 43 bp, Emericella nidulans
gttctcgagacgagcgatcgcgagttatggcggagccgaaaga

SEQ ID NO: 30614 - DNA, 48 bp, Emericella nidulans
gaattcactgcggccgccatgatcataatgggtgtatcagggcatagg

SEQ ID NO: 30615 - DNA, 41 bp, Emericella nidulans
gttctcgagacgagcgatcgccggcgcctgaggttgctgaa

SEQ ID NO: 30616 - DNA, 52 bp, Emericella nidulans
gaattcactgcggccgccatggaggctgtagcactgcagtgtttagggaata

SEQ ID NO: 30617 - DNA, 43 bp, Emericella nidulans
gttctcgagacgagcgatcgctgctttttctgttggcgcttgg

SEQ ID NO: 30618 - DNA, 57 bp, Emericella nidulans
gaattcactgcggccgccatgcttatgataaatttcaattctttgtataaccggaga

SEQ ID NO: 30619 - DNA, 52 bp, Emericella nidulans
gttctcgagacgagcgatcgcccttcactgattccattacatttctgtcacg

SEQ ID NO: 30620 - DNA, 57 bp, Emericella nidulans
gaattcactgcggccgccatgtacatgtttcctagtatcataaagaccaagagtagc

SEQ ID NO: 30621 - DNA, 41 bp, Emericella nidulans
gttctcgagacgagcgatcgctggcacagggcacagaagca

SEQ ID NO: 30622 - DNA, 43 bp, Emericella nidulans; identical to SEQ ID NO: 29176

SEQ ID NO: 30623 - DNA, 44 bp, Emericella nidulans; identical to SEQ ID NO: 29177

SEQ ID NO: 30624 - DNA, 41 bp, Emericella nidulans
gaattcactgcggccgccatgtggttgcccaaggtgcgtca

SEQ ID NO: 30625 - DNA, 43 bp, Emericella nidulans
gttctcgagacgagcgatcgcccgcttgggaccattcaagtca

SEQ ID NO: 30626 - DNA, 43 bp, Emericella nidulans
gaattcactgcggccgccatggcaccctggaccttgcatacgg

SEQ ID NO: 30627 - DNA, 51 bp, Emericella nidulans
gttctcgagacgagcgatcgctactgagcgtacttcacgtttcttccaagc

SEQ ID NO: 30628 - DNA, 50 bp, Emericella nidulans
gaattcactgcggccgccatgcattcttccctaacttattcgatgtctcg

SEQ ID NO: 30629 - DNA, 41 bp, Emericella nidulans
gttctcgagacgagcgatcgccgcccgataacgcgatgcag

SEQ ID NO: 30630 - DNA, 54 bp, Emericella nidulans
gaattcactgcggccgccatgacagtaacaagttgacaactggaagtcacatcg

SEQ ID NO: 30631 - DNA, 55 bp, Emericella nidulans
gttctcgagacgagcgatcgccgagctgacattaatatgattgttcacatcccac

SEQ ID NO: 30632 - DNA, 52 bp, Emericella nidulans
gaattcactgcggccgccatgctaaactaattttcattagcggcctttctgg

SEQ ID NO: 30633 - DNA, 41 bp, Emericella nidulans
gttctcgagacgagcgatcgcccccaacaagcggctgcata

SEQ ID NO: 30634 - DNA, 50 bp, Emericella nidulans
gaattcactgcggccgccatgcgtaaggggtctattgtggtaagagatga

SEQ ID NO: 30635 - DNA, 41 bp, Emericella nidulans
gttctcgagacgagcgatcgctccgggaagaagccaagctc

SEQ ID NO: 30636 - DNA, 48 bp, Emericella nidulans
gaattcactgcggccgccatgtctctgcctaatggcaactaccctcca

SEQ ID NO: 30637 - DNA, 48 bp, Emericella nidulans
gttctcgagacgagcgatcgcggtcctggtcagtaggaagacctgcaa

SEQ ID NO: 30638 - DNA, 48 bp, Emericella nidulans
gaattcactgcggccgccatgggggtagtttgttgatgatggtgaggc

SEQ ID NO: 30639 - DNA, 47 bp, Emericella nidulans
gttctcgagacgagcgatcgcccagctcagcaagctagacaagtgga

SEQ ID NO: 30640 - DNA, 48 bp, Emericella nidulans
gaattcactgcggccgccatggccgtcctgaaatgtttcacaagatga

SEQ ID NO: 30641 - DNA, 43 bp, Emericella nidulans
gttctcgagacgagcgatcgcccgggcgccactactcatttcc

SEQ ID NO: 30642 - DNA, 54 bp, Emericella nidulans
gaattcactgcggccgccatgactggttatatagtttgccgtcgccaacggtct

SEQ ID NO: 30643 - DNA, 51 bp, Emericella nidulans
gttctcgagacgagcgatcgcggatcctctagactggaatccagcttcttc

SEQ ID NO: 30644 - DNA, 55 bp, Emericella nidulans
gaattcactgcggccgccatggaaaaagaaaggacatcagatgacgctcttcaaa

SEQ ID NO: 30645 - DNA, 42 bp, Emericella nidulans
gttctcgagacgagcgatcgcccaccattgatggggctcctg

SEQ ID NO: 30646 - DNA, 41 bp, Emericella nidulans
gaattcactgcggccgccatgggcccaggcattcagggagg

SEQ ID NO: 30647 - DNA, 41 bp, Emericella nidulans
gttctcgagacgagcgatcgcacggcgacgagttgccttcg

SEQ ID NO: 30648 - DNA, 48 bp, Emericella nidulans
gaattcactgcggccgccatgcagcttgcagcagtattgaactcagtg

SEQ ID NO: 30649 - DNA, 39 bp, Emericella nidulans
gttctcgagacgagcgatcgctcagggcccaggctgatg

SEQ ID NO: 30650 - DNA, 50 bp, Emericella nidulans
gaattcactgcggccgccatggtagatgaaacgaggcgtcattgagacaa

SEQ ID NO: 30651 - DNA, 53 bp, Emericella nidulans
gttctcgagacgagcgatcgcgacctatccctcaaagaagcccttacaggttg

SEQ ID NO: 30652 - DNA, 56 bp, Emericella nidulans
gaattcactgcggccgccatgatataataatttcaactcttaccgaacaacgaagc

SEQ ID NO: 30653 - DNA, 52 bp, Emericella nidulans
gttctcgagacgagcgatcgctcatatattcgacaggtcctcgattttgtcc

SEQ ID NO: 30654 - DNA, 51 bp, Emericella nidulans
gaattcactgcggccgccatgtgagttagaatacgctgtgaatggtagatg

SEQ ID NO: 30655 - DNA, 52 bp, Emericella nidulans
gttctcgagacgagcgatcgccttatagaacgttacaagccgatttcgtaca

SEQ ID NO: 30656 - DNA, 52 bp, Emericella nidulans
gaattcactgcggccgccatgtattctcagcttcattgattccaacattgtg

SEQ ID NO: 30657 - DNA, 44 bp, Emericella nidulans
gttctcgagacgagcgatcgctctttccatccatcggtcacggt

SEQ ID NO: 30658 - DNA, 54 bp, Emericella nidulans
gaattcactgcggccgccatgtaagtttcttggatcttgaattgactactgatg

SEQ ID NO: 30659 - DNA, 54 bp, Emericella nidulans
gttctcgagacgagcgatcgctaattgagtttgtagacctggagaatatgttga

SEQ ID NO: 30660 - DNA, 54 bp, Emericella nidulans
gaattcactgcggccgccatgttcaaggagaaattccataccagatactttcca

SEQ ID NO: 30661 - DNA, 52 bp, Emericella nidulans
gttctcgagacgagcgatcgcccagaagaggttctttccatactacgtgcag

SEQ ID NO: 30662 - DNA, 44 bp, Emericella nidulans
gaattcactgcggccgccatgtgtcagcagtaccgccgttaccc

SEQ ID NO: 30663 - DNA, 52 bp, Emericella nidulans
gttctcgagacgagcgatcgcttcaacttctccgtcctacaattctgattcc

SEQ ID NO: 30664 - DNA, 49 bp, Emericella nidulans
gaattcactgcggccgccatgcaccgctaagaaggatgacttgaagtgt

SEQ ID NO: 30665 - DNA, 41 bp, Emericella nidulans
gttctcgagacgagcgatcgcggcaagggacgaccggtgaa

SEQ ID NO: 30666 - DNA, 41 bp, Emericella nidulans
gaattcactgcggccgccatgctcacggcatccgtcgacca

SEQ ID NO: 30667 - DNA, 48 bp, Emericella nidulans; identical to SEQ ID NO: 29621

SEQ ID NO: 30668 - DNA, 41 bp, Emericella nidulans
gaattcactgcggccgccatgccccggcgtcccgatgttat

SEQ ID NO: 30669 - DNA, 41 bp, Emericella nidulans
gttctcgagacgagcgatcgctgaagaaggccggggtcaaa

SEQ ID NO: 30670 - DNA, 54 bp, Emericella nidulans
gaattcactgcggccgccatgtaaaaggaggatatcattcagttacatctagcc

SEQ ID NO: 30671 - DNA, 44 bp, Emericella nidulans
gttctcgagacgagcgatcgccacgaaccggcaggttagtaccg

SEQ ID NO: 30672 - DNA, 41 bp, Emericella nidulans
gaattcactgcggccgccatgtttggccagggcaggagaca

SEQ ID NO: 30673 - DNA, 44 bp, Emericella nidulans
gttctcgagacgagcgatcgctggccgtagctgacctgacctga

SEQ ID NO: 30674 - DNA, 42 bp, Emericella nidulans
gaattcactgcggccgccatgtcggccacaactctcccctca

SEQ ID NO: 30675 - DNA, 57 bp, Emericella nidulans; identical to SEQ ID NO: 29329

SEQ ID NO: 30676 - DNA, 57 bp, Emericella nidulans
gaattcactgcggccgccatgtgtttataaaccaagaaactatgacaggctactatc

SEQ ID NO: 30677 - DNA, 49 bp, Emericella nidulans
gttctcgagacgagcgatcgcgagagcctaattctgaatttttgggtcc

SEQ ID NO: 30678 - DNA, 41 bp, Emericella nidulans
gaattcactgcggccgccatgtaggccgcggagtccgtatg

SEQ ID NO: 30679 - DNA, 41 bp, Emericella nidulans
gttctcgagacgagcgatcgccgcacctggtggcagcagaa

SEQ ID NO: 30680 - DNA, 49 bp, Emericella nidulans
gaattcactgcggccgccatgggatggctattgatgaattgattgagcc

SEQ ID NO: 30681 - DNA, 41 bp, Emericella nidulans
gttctcgagacgagcgatcgccctagcccgcctggggagaa

SEQ ID NO: 30682 - DNA, 41 bp, Emericella nidulans
gaattcactgcggccgccatgacgggttgggctggcgctat

SEQ ID NO: 30683 - DNA, 50 bp, Emericella nidulans
gttctcgagacgagcgatcgcaagctctaaacatcctgtatcatgtgcaa

SEQ ID NO: 30684 - DNA, 41 bp, Emericella nidulans
gaattcactgcggccgccatggccgggtggacaagactccc

SEQ ID NO: 30685 - DNA, 57 bp, Emericella nidulans; identical to SEQ ID NO: 29069

SEQ ID NO: 30686 - DNA, 42 bp, Emericella nidulans
gaattcactgcggccgccatgggcactcattaccggcggaga

SEQ ID NO: 30687 - DNA, 41 bp, Emericella nidulans; identical to SEQ ID NO: 29289

SEQ ID NO: 30688 - DNA, 42 bp, Emericella nidulans
gaattcactgcggccgccatgtcaccaagaagcggtcgtggc

SEQ ID NO: 30689 - DNA, 43 bp, Emericella nidulans
gttctcgagacgagcgatcgccagcagcgatgccagatacaag

SEQ ID NO: 30690 - DNA, 42 bp, Emericella nidulans
gaattcactgcggccgccatgtgtcacggccagcgaatttgg

SEQ ID NO: 30691 - DNA, 41 bp, Emericella nidulans
gttctcgagacgagcgatcgcccgctccgcaggggcattat

SEQ ID NO: 30692 - DNA, 54 bp, Emericella nidulans
gaattcactgcggccgccatgtgcgagatcctgaaaagaaaatatagaaggtga

SEQ ID NO: 30693 - DNA, 42 bp, Emericella nidulans
gttctcgagacgagcgatcgctgcgaagaagcgtgctgagga

SEQ ID NO: 30694 - DNA, 51 bp, Emericella nidulans
gaattcactgcggccgccatgaaggctgacctaaatcagtcgattctctgc

SEQ ID NO: 30695 - DNA, 42 bp, Emericella nidulans
gttctcgagacgagcgatcgccgctggagagcgactcgtgga

SEQ ID NO: 30696 - DNA, 41 bp, Emericella nidulans
gaattcactgcggccgccatggcccggccagccgttaactc

SEQ ID NO: 30697 - DNA, 50 bp, Emericella nidulans
gttctcgagacgagcgatcgcagaaaagcaaatccataattatgcgcaac

SEQ ID NO: 30698 - DNA, 41 bp, Emericella nidulans
gaattcactgcggccgccatggaccggtcagcacggcttcg

SEQ ID NO: 30699 - DNA, 41 bp, Emericella nidulans; identical to SEQ ID NO: 29421

SEQ ID NO: 30700 - DNA, 42 bp, Emericella nidulans
gaattcactgcggccgccatgcaccaaggcccccaagatcca

SEQ ID NO: 30701 - DNA, 45 bp, Emericella nidulans
gttctcgagacgagcgatcgccgacttgcttcgttcgtttgctcc

SEQ ID NO: 30702 - DNA, 41 bp, Emericella nidulans
gaattcactgcggccgccatgcgccccacagatgccgaact

SEQ ID NO: 30703 - DNA, 46 bp, Emericella nidulans
gttctcgagacgagcgatcgcccacgtagaacacagcacatgttga

SEQ ID NO: 30704 - DNA, 41 bp, Emericella nidulans
gaattcactgcggccgccatgtgcgacgacagcagcggatt

SEQ ID NO: 30705 - DNA, 41 bp, Emericella nidulans
gttctcgagacgagcgatcgccgcggagctgggaaggatga

SEQ ID NO: 30706 - DNA, 41 bp, Emericella nidulans; identical to SEQ ID NO: 29246

SEQ ID NO: 30707 - DNA, 48 bp, Emericella nidulans; identical to SEQ ID NO: 29247

SEQ ID NO: 30708 - DNA, 47 bp, Emericella nidulans
gaattcactgcggccgccatgtccagtgggagtctgacttccttgct

SEQ ID NO: 30709 - DNA, 49 bp, Emericella nidulans
gttctcgagacgagcgatcgcgaaaggcagacaatgctttcattgagat

SEQ ID NO: 30710 - DNA, 51 bp, Emericella nidulans
gaattcactgcggccgccatgtagttagaaggagaaggggtgtgtcgcaag

SEQ ID NO: 30711 - DNA, 53 bp, Emericella nidulans; identical to SEQ ID NO: 29571

SEQ ID NO: 30712 - DNA, 50 bp, Emericella nidulans
gaattcactgcggccgccatgtgaacatctgaatatcaaggtcaccgaca

SEQ ID NO: 30713 - DNA, 54 bp, Emericella nidulans
gttctcgagacgagcgatcgcacaaaagggactaacatatgatacctcctaaca

SEQ ID NO: 30714 - DNA, 41 bp, Emericella nidulans
gaattcactgcggccgccatggcaatgcccacctcgtcgat

SEQ ID NO: 30715 - DNA, 42 bp, Emericella nidulans; identical to SEQ ID NO: 29643

SEQ ID NO: 30716 - DNA, 46 bp, Emericella nidulans
gaattcactgcggccgccatgtagcaagcgagatcagagtgaatgc

SEQ ID NO: 30717 - DNA, 43 bp, Emericella nidulans
gttctcgagacgagcgatcgcggtcagcgggtgaagggtatgg

SEQ ID NO: 30718 - DNA, 41 bp, Emericella nidulans
gaattcactgcggccgccatgaccccttcgatgcccgctgt

SEQ ID NO: 30719 - DNA, 53 bp, Emericella nidulans
gttctcgagacgagcgatcgcatagcgaaacaaagtgaagtttattgcaaacg

SEQ ID NO: 30720 - DNA, 41 bp, Emericella nidulans
gaattcactgcggccgccatgaggtgcgggccaggttctga

SEQ ID NO: 30721 - DNA, 53 bp, Emericella nidulans
gttctcgagacgagcgatcgccgagacaaacgaagtaacaatttaatccagca

SEQ ID NO: 30722 - DNA, 41 bp, Emericella nidulans
gaattcactgcggccgccatgccgccgaaacctctgctgaa

SEQ ID NO: 30723 - DNA, 49 bp, Emericella nidulans; identical to SEQ ID NO: 29403

SEQ ID NO: 30724 - DNA, 42 bp, Emericella nidulans
gaattcactgcggccgccatgcgctgcaatgctgatgaggga

SEQ ID NO: 30725 - DNA, 49 bp, Emericella nidulans
gttctcgagacgagcgatcgcatggtaagtatgggccttccaagtagac

SEQ ID NO: 30726 - DNA, 41 bp, Emericella nidulans
gaattcactgcggccgccatgccgtcggcagtctccgcttt

SEQ ID NO: 30727 - DNA, 42 bp, Emericella nidulans; identical to SEQ ID NO: 29491

SEQ ID NO: 30728 - DNA, 42 bp, Emericella nidulans
gaattcactgcggccgccatgtggcctgggtgtttcgacctg

SEQ ID NO: 30729 - DNA, 50 bp, Emericella nidulans
gttctcgagacgagcgatcgctgagttgtccacgaaaatgtctttgttca

SEQ ID NO: 30730 - DNA, 46 bp, Emericella nidulans
gaattcactgcggccgccatgtaccttacccaagtgcgacaggaga

SEQ ID NO: 30731 - DNA, 49 bp, Emericella nidulans
gttctcgagacgagcgatcgcaataataccctgcggtctgaaagcgaaa

SEQ ID NO: 30732 - DNA, 41 bp, Emericella nidulans
gaattcactgcggccgccatggcccgaaatgcctccaatca

SEQ ID NO: 30733 - DNA, 44 bp, Emericella nidulans
gttctcgagacgagcgatcgccgaccaagtccgccaacatttca

SEQ ID NO: 30734 - DNA, 48 bp, Emericella nidulans
gaattcactgcggccgccatgagaaccataatcaccgcgcgagccata

SEQ ID NO: 30735 - DNA, 41 bp, Emericella nidulans
gttctcgagacgagcgatcgctcacggcgctcgtgatgacc

SEQ ID NO: 30736 - DNA, 43 bp, Emericella nidulans
gaattcactgcggccgccatgtccgttgctggtggtgacttgg

SEQ ID NO: 30737 - DNA, 49 bp, Emericella nidulans
gttctcgagacgagcgatcgcgtacagtgttccgattcaaggaaactcg

SEQ ID NO: 30738 - DNA, 49 bp, Emericella nidulans
gaattcactgcggccgccatgacagcaattgatcctttccatttatttg

SEQ ID NO: 30739 - DNA, 49 bp, Emericella nidulans
gttctcgagacgagcgatcgccaaactataccacaatgcctcgctactc

SEQ ID NO: 30740 - DNA, 43 bp, Emericella nidulans
gaattcactgcggccgccatggcatggtcttggtctccgggtc

SEQ ID NO: 30741 - DNA, 49 bp, Emericella nidulans
gttctcgagacgagcgatcgccgaaaagtgagcgttttctttcttgttg

SEQ ID NO: 30742 - DNA, 41 bp, Emericella nidulans
gaattcactgcggccgccatgttcaggctcaggccgctggt

SEQ ID NO: 30743 - DNA, 49 bp, Emericella nidulans
gttctcgagacgagcgatcgctaagtatacattgaccgccacgcccaac

SEQ ID NO: 30744 - DNA, 40 bp, Emericella nidulans
gaattcactgcggccgccatgccgtgctgctgttggtgcc

SEQ ID NO: 30745 - DNA, 42 bp, Emericella nidulans
gttctcgagacgagcgatcgcccgcaaccaccggcactactc

SEQ ID NO: 30746 - DNA, 48 bp, Emericella nidulans
gaattcactgcggccgccatgttctatggttgattttgacaccgagcc

SEQ ID NO: 30747 - DNA, 49 bp, Emericella nidulans
gttctcgagacgagcgatcgcagaagtcgagtctcaattgctcgctctt

SEQ ID NO: 30748 - DNA, 48 bp, Emericella nidulans
gaattcactgcggccgccatgacaatgatgactgcggcttttattgtc

SEQ ID NO: 30749 - DNA, 41 bp, Emericella nidulans
gttctcgagacgagcgatcgcgagcaggcgccgcattatcc

SEQ ID NO: 30750 - DNA, 41 bp, Emericella nidulans
gaattcactgcggccgccatgccgcgcaacaaccctcctca

SEQ ID NO: 30751 - DNA, 44 bp, Emericella nidulans
gttctcgagacgagcgatcgcgccattgacgtctaactgggtgg

SEQ ID NO: 30752 - DNA, 43 bp, Emericella nidulans
gaattcactgcggccgccatgccgtttcatcaaggcccctttt

SEQ ID NO: 30753 - DNA, 49 bp, Emericella nidulans
gttctcgagacgagcgatcgcagctcgtatacattctgaaagccaaacc

SEQ ID NO: 30754 - DNA, 43 bp, Emericella nidulans
gaattcactgcggccgccatgtctcaaagccgcctgattccct

SEQ ID NO: 30755 - DNA, 47 bp, Emericella nidulans
gttctcgagacgagcgatcgccaagccgtgcttacctgtatggttcg

SEQ ID NO: 30756 - DNA, 42 bp, Emericella nidulans
gaattcactgcggccgccatggctccgcgtcaacgatcgaaa

SEQ ID NO: 30757 - DNA, 49 bp, Emericella nidulans
gttctcgagacgagcgatcgctaggtggatatctgatgcgatgcggtct

SEQ ID NO: 30758 - DNA, 41 bp, Emericella nidulans
gaattcactgcggccgccatgaaaacatcaaacgggcttat

SEQ ID NO: 30759 - DNA, 41 bp, Emericella nidulans
gttctcgagacgagcgatcgcgtgacagacttcccgaaagg

SEQ ID NO: 30760 - DNA, 42 bp, Emericella nidulans
gaattcactgcggccgccatgggccctcaaatagaggagatg

SEQ ID NO: 30761 - DNA, 47 bp, Emericella nidulans
gttctcgagacgagcgatcgcgacaagttcatatcatcctttaatcc

SEQ ID NO: 30762 - DNA, 49 bp, Emericella nidulans
gaattcactgcggccgccatgtatacctttcagagtgcaaatcagagcc

SEQ ID NO: 30763 - DNA, 49 bp, Emericella nidulans
gttctcgagacgagcgatcgcccctgctcttttgttctttgtgtgtttc

SEQ ID NO: 30764 - DNA, 40 bp, Emericella nidulans
gaattcactgcggccgccatgcccgttccagaacggcacc

SEQ ID NO: 30765 - DNA, 41 bp, Emericella nidulans
gttctcgagacgagcgatcgccatgcaggccaagcggaaca

SEQ ID NO: 30766 - DNA, 44 bp, Emericella nidulans
gaattcactgcggccgccatgaaaaatacagttggcaaaaagga

SEQ ID NO: 30767 - DNA, 41 bp, Emericella nidulans
gttctcgagacgagcgatcgcgtctcgcccaaaatgactgt

SEQ ID NO: 30768 - DNA, 42 bp, Emericella nidulans
gaattcactgcggccgccatggcgcacgtggagagacgatca

SEQ ID NO: 30769 - DNA, 44 bp, Emericella nidulans
gttctcgagacgagcgatcgccccatttggaacgtgctgtttgc

SEQ ID NO: 30770 - DNA, 41 bp, Emericella nidulans
gaattcactgcggccgccatgacatgtctgcgaaaaccctc

SEQ ID NO: 30771 - DNA, 43 bp, Emericella nidulans
gttctcgagacgagcgatcgctgctgaagtccgtataatgcac

SEQ ID NO: 30772 - DNA, 41 bp, Emericella nidulans
gaattcactgcggccgccatgccctcgaagactgagcaagt

SEQ ID NO: 30773 - DNA, 41 bp, Emericella nidulans
gttctcgagacgagcgatcgcgccgtggtatatcaggatca

SEQ ID NO: 30774 - DNA, 42 bp, Emericella nidulans
gaattcactgcggccgccatgcgtgatccgcttccggagctt

SEQ ID NO: 30775 - DNA, 49 bp, Emericella nidulans
gttctcgagacgagcgatcgctggataacgacaactgtattcgcgctct

SEQ ID NO: 30776 - DNA, 47 bp, Emericella nidulans
gaattcactgcggccgccatggtaagttcaacccgctctggctggta

SEQ ID NO: 30777 - DNA, 49 bp, Emericella nidulans
gttctcgagacgagcgatcgcctagagacctcacttgagcatccgacga

SEQ ID NO: 30778 - DNA, 41 bp, Emericella nidulans
gaattcactgcggccgccatgcctcgactgagactgggttc

SEQ ID NO: 30779 - DNA, 46 bp, Emericella nidulans
gttctcgagacgagcgatcgctaagaaacaacttgaatcacctttc

SEQ ID NO: 30780 - DNA, 39 bp, Emericella nidulans
gaattcactgcggccgccatgctcgttggcggtgatctt

SEQ ID NO: 30781 - DNA, 47 bp, Emericella nidulans
gttctcgagacgagcgatcgccgggtttgaaatgattctaaatctca

SEQ ID NO: 30782 - DNA, 45 bp, Emericella nidulans
gaattcactgcggccgccatgtggccgttggttctatccaaactc

SEQ ID NO: 30783 - DNA, 49 bp, Emericella nidulans
gttctcgagacgagcgatcgctaatatccggtcttcctcctcatattcg

SEQ ID NO: 30784 - DNA, 41 bp, Emericella nidulans
gaattcactgcggccgccatgggattgcaagggtcctacag

SEQ ID NO: 30785 - DNA, 41 bp, Emericella nidulans
gttctcgagacgagcgatcgctggattgcattctttttcca

SEQ ID NO: 30786 - DNA, 41 bp, Emericella nidulans
gaattcactgcggccgccatggcagtcgcccattccagcct

SEQ ID NO: 30787 - DNA, 49 bp, Emericella nidulans
gttctcgagacgagcgatcgcaagtcatttgtaagacctggaggaaccc

SEQ ID NO: 30788 - DNA, 49 bp, Emericella nidulans
gaattcactgcggccgccatgttttagctgtggaatagagatggcttgt

SEQ ID NO: 30789 - DNA, 49 bp, Emericella nidulans
gttctcgagacgagcgatcgcatactgatatcaagttcgctttggcaac

SEQ ID NO: 30790 - DNA, 44 bp, Emericella nidulans
gaattcactgcggccgccatggaaagatggcatatccctcataa

SEQ ID NO: 30791 - DNA, 49 bp, Emericella nidulans
gttctcgagacgagcgatcgcgtgtttgtttactttaattcattcatca

SEQ ID NO: 30792 - DNA, 43 bp, Emericella nidulans
gaattcactgcggccgccatggtggctgaagaggcaggggagg

SEQ ID NO: 30793 - DNA, 49 bp, Emericella nidulans
gttctcgagacgagcgatcgcctcttagcctaaccataacacacgaggc

SEQ ID NO: 30794 - DNA, 46 bp, Emericella nidulans
gaattcactgcggccgccatgtctgtttcctatatgagaatcttgc

SEQ ID NO: 30795 - DNA, 41 bp, Emericella nidulans
gttctcgagacgagcgatcgcgaaggcagctaaggttggtg

SEQ ID NO: 30796 - DNA, 41 bp, Emericella nidulans
gaattcactgcggccgccatgaatgagttcccactggacga

SEQ ID NO: 30797 - DNA, 41 bp, Emericella nidulans
gttctcgagacgagcgatcgctttgcctggcaactatcttg

SEQ ID NO: 30798 - DNA, 41 bp, Emericella nidulans
gaattcactgcggccgccatgaaaaccctccttgtcgaacc

SEQ ID NO: 30799 - DNA, 49 bp, Emericella nidulans
gttctcgagacgagcgatcgcactgaacagaatacattatataaccaga

SEQ ID NO: 30800 - DNA, 43 bp, Emericella nidulans
gaattcactgcggccgccatgggcgatgatcgagcttgcactg

SEQ ID NO: 30801 - DNA, 49 bp, Emericella nidulans
gttctcgagacgagcgatcgctgtttattcgtacttcgagagtggggag

SEQ ID NO: 30802 - DNA, 44 bp, Emericella nidulans
gaattcactgcggccgccatgtggaccaattgacgcaggagaca

SEQ ID NO: 30803 - DNA, 49 bp, Emericella nidulans
gttctcgagacgagcgatcgccagagtgctacctctatctgaccacctt

SEQ ID NO: 30804 - DNA, 49 bp, Emericella nidulans
gaattcactgcggccgccatggtgaacgcctaataaaacaattcgccta

SEQ ID NO: 30805 - DNA, 41 bp, Emericella nidulans
gttctcgagacgagcgatcgccgccgaggagacattcgaca

SEQ ID NO: 30806 - DNA, 41 bp, Emericella nidulans
gaattcactgcggccgccatggtcatgtcgagggcgtagat

SEQ ID NO: 30807 - DNA, 41 bp, Emericella nidulans
gttctcgagacgagcgatcgcgagtgcttcattgctcatgg

SEQ ID NO: 30808 - DNA, 41 bp, Emericella nidulans
gaattcactgcggccgccatgctcggtacgccattgaaaat

SEQ ID NO: 30809 - DNA, 40 bp, Emericella nidulans
gttctcgagacgagcgatcgctgtgtaagcctccgcattc

SEQ ID NO: 30810 - DNA, 43 bp, Emericella nidulans
gaattcactgcggccgccatgcgatccttccttgcctgagtga

SEQ ID NO: 30811 - DNA, 49 bp, Emericella nidulans
gttctcgagacgagcgatcgcatactggtcatgagcactaaccgtcttg

SEQ ID NO: 30812 - DNA, 41 bp, Emericella nidulans
gaattcactgcggccgccatgcacccgcagtcgcaccaaga

SEQ ID NO: 30813 - DNA, 42 bp, Emericella nidulans
gttctcgagacgagcgatcgcgccgcggttcctatgactgct

SEQ ID NO: 30814 - DNA, 44 bp, Emericella nidulans
gaattcactgcggccgccatgtcaggaacctttggtcgcaaacc

SEQ ID NO: 30815 - DNA, 41 bp, Emericella nidulans
gttctcgagacgagcgatcgctccgcccagaaacccgatga

SEQ ID NO: 30816 - DNA, 49 bp, Emericella nidulans
gaattcactgcggccgccatgagcgctcctctacactcgttaccttacc

SEQ ID NO: 30817 - DNA, 41 bp, Emericella nidulans
gttctcgagacgagcgatcgccgcaccagcgtcttggtgat

SEQ ID NO: 30818 - DNA, 42 bp, Emericella nidulans
gaattcactgcggccgccatgccctgcccgatggctacaaca

SEQ ID NO: 30819 - DNA, 42 bp, Emericella nidulans
gttctcgagacgagcgatcgctggcttcagccccaaaatgga

SEQ ID NO: 30820 - DNA, 45 bp, Emericella nidulans
gaattcactgcggccgccatgcaagagccagctcgctgagtacgg

SEQ ID NO: 30821 - DNA, 49 bp, Emericella nidulans
gttctcgagacgagcgatcgcttgaaaatttcttggattaaaccgccac

SEQ ID NO: 30822 - DNA, 49 bp, Emericella nidulans
gaattcactgcggccgccatggaacacttgcagaggttgctaaacattg

SEQ ID NO: 30823 - DNA, 49 bp, Emericella nidulans
gttctcgagacgagcgatcgcacattgtagccatcactttgacccgatt

SEQ ID NO: 30824 - DNA, 49 bp, Emericella nidulans
gaattcactgcggccgccatgagcgcaacataatctattgccctgccta

SEQ ID NO: 30825 - DNA, 41 bp, Emericella nidulans
gttctcgagacgagcgatcgccgccaatctccccgcaaaca

SEQ ID NO: 30826 - DNA, 47 bp, Emericella nidulans
gaattcactgcggccgccatgaggagacagaaatcgtacatatcaca

SEQ ID NO: 30827 - DNA, 41 bp, Emericella nidulans
gttctcgagacgagcgatcgcacaatggccgtggtaacaat

SEQ ID NO: 30828 - DNA, 49 bp, Emericella nidulans
gaattcactgcggccgccatgaatctcaaggcttaatacgactcgaaca

SEQ ID NO: 30829 - DNA, 47 bp, Emericella nidulans
gttctcgagacgagcgatcgccttggagattgtttgagcgtcctctt

SEQ ID NO: 30830 - DNA, 49 bp, Emericella nidulans
gaattcactgcggccgccatggtcatctacatcaatccacatcctgaca

SEQ ID NO: 30831 - DNA, 48 bp, Emericella nidulans
gttctcgagacgagcgatcgctactcccagatttctcgtgcaagcatc

SEQ ID NO: 30832 - DNA, 45 bp, Emericella nidulans
gaattcactgcggccgccatgcttggttacgggtgctctcctggt

SEQ ID NO: 30833 - DNA, 48 bp, Emericella nidulans
gttctcgagacgagcgatcgcagcctctcaaaatatccaaggccaaca

SEQ ID NO: 30834 - DNA, 42 bp, Emericella nidulans
gaattcactgcggccgccatgcgcaacaatgggcgaggctta

SEQ ID NO: 30835 - DNA, 49 bp, Emericella nidulans
gttctcgagacgagcgatcgcaacataggccagtttcgttactatgtcg

SEQ ID NO: 30836 - DNA, 44 bp, Emericella nidulans
gaattcactgcggccgccatgtggataccggccagacccgagtt

SEQ ID NO: 30837 - DNA, 49 bp, Emericella nidulans
gttctcgagacgagcgatcgctgatggagataagatgccattccttcac

SEQ ID NO: 30838 - DNA, 48 bp, Emericella nidulans
gaattcactgcggccgccatgcgagaaaagagataattaacagtacaa

SEQ ID NO: 30839 - DNA, 41 bp, Emericella nidulans
gttctcgagacgagcgatcgcggtcatgcgaagcactatga

SEQ ID NO: 30840 - DNA, 47 bp, Emericella nidulans
gaattcactgcggccgccatggggatctaccaaaccttttcgacttc

SEQ ID NO: 30841 - DNA, 45 bp, Emericella nidulans
gttctcgagacgagcgatcgctcctcgaacccgatacagagaagc

SEQ ID NO: 30842 - DNA, 41 bp, Emericella nidulans
gaattcactgcggccgccatggcgtcactagtcgcagaaca

SEQ ID NO: 30843 - DNA, 41 bp, Emericella nidulans
gttctcgagacgagcgatcgcctgcagactgcatcgtgaat

SEQ ID NO: 30844 - DNA, 49 bp, Emericella nidulans
gaattcactgcggccgccatgagaacgtacaacaaattgaccaaacctc

SEQ ID NO: 30845 - DNA, 48 bp, Emericella nidulans
gttctcgagacgagcgatcgctactggtccgacatggttggcccttag

SEQ ID NO: 30846 - DNA, 47 bp, Emericella nidulans
gaattcactgcggccgccatgatctgtagttattgagatgccggata

SEQ ID NO: 30847 - DNA, 44 bp, Emericella nidulans
gttctcgagacgagcgatcgcttttacgtacggtagaaaaagca

SEQ ID NO: 30848 - DNA, 46 bp, Emericella nidulans
gaattcactgcggccgccatgccgataaggacaagagtggatttgg

SEQ ID NO: 30849 - DNA, 49 bp, Emericella nidulans; identical to SEQ ID NO: 30569

SEQ ID NO: 30850 - DNA, 42 bp, Emericella nidulans
gaattcactgcggccgccatgttggggtcaacactctatttt

SEQ ID NO: 30851 - DNA, 41 bp, Emericella nidulans
gttctcgagacgagcgatcgcctcatcgtcctctgcctcct

SEQ ID NO: 30852 - DNA, 46 bp, Emericella nidulans
gaattcactgcggccgccatggaaagaatgtattgagaagcaatca

SEQ ID NO: 30853 - DNA, 46 bp, Emericella nidulans
gttctcgagacgagcgatcgcgagaaaatgtgcactgttatgttcc

SEQ ID NO: 30854 - DNA, 46 bp, Emericella nidulans
gaattcactgcggccgccatggaatcttcagtgatggcgcatgaga

SEQ ID NO: 30855 - DNA, 45 bp, Emericella nidulans
gttctcgagacgagcgatcgccagagataggcggcaaagaagtcg

SEQ ID NO: 30856 - DNA, 41 bp, Emericella nidulans
gaattcactgcggccgccatgacaggtcgacattcaaggct

SEQ ID NO: 30857 - DNA, 41 bp, Emericella nidulans
gttctcgagacgagcgatcgcatattcagagccgctgtggt

SEQ ID NO: 30858 - DNA, 48 bp, Emericella nidulans
gaattcactgcggccgccatgaagacgctgacccacaatcaagtaaca

SEQ ID NO: 30859 - DNA, 49 bp, Emericella nidulans
gttctcgagacgagcgatcgctcaggtcaaagcaaagacacatacctaa

SEQ ID NO: 30860 - DNA, 45 bp, Emericella nidulans
gaattcactgcggccgccatggtccagctgagaccggtacacata

SEQ ID NO: 30861 - DNA, 41 bp, Emericella nidulans
gttctcgagacgagcgatcgcggaaggcgcactgtaattgt

SEQ ID NO: 30862 - DNA, 49 bp, Emericella nidulans
gaattcactgcggccgccatgtgttcctttaactcttgattcggtttgg

SEQ ID NO: 30863 - DNA, 49 bp, Emericella nidulans
gttctcgagacgagcgatcgccaagctccagatccagaacctgagcact

SEQ ID NO: 30864 - DNA, 41 bp, Emericella nidulans
gaattcactgcggccgccatgttgagcgggcggatttgcta

SEQ ID NO: 30865 - DNA, 49 bp, Emericella nidulans
gttctcgagacgagcgatcgcgaaaaaggcatgaagggttcaagaacga

SEQ ID NO: 30866 - DNA, 43 bp, Emericella nidulans
gaattcactgcggccgccatgcaagaacttgatttccactacg

SEQ ID NO: 30867 - DNA, 41 bp, Emericella nidulans
gttctcgagacgagcgatcgcgcccatcatcacttcctctc

SEQ ID NO: 30868 - DNA, 49 bp, Emericella nidulans
gaattcactgcggccgccatgacaattaaatctgtagttattgagatgc

SEQ ID NO: 30869 - DNA, 44 bp, Emericella nidulans; identical to SEQ ID NO: 30847

SEQ ID NO: 30870 - DNA, 41 bp, Emericella nidulans
gaattcactgcggccgccatgcaagaagtcggaaagaaacg

SEQ ID NO: 30871 - DNA, 41 bp, Emericella nidulans
gttctcgagacgagcgatcgccccgaagcatatgtttgtca

SEQ ID NO: 30872 - DNA, 49 bp, Emericella nidulans
gaattcactgcggccgccatgcactgcgttgagtaaatccattccttgg

SEQ ID NO: 30873 - DNA, 41 bp, Emericella nidulans
gttctcgagacgagcgatcgccgaggaggtcgcggctgaaa

SEQ ID NO: 30874 - DNA, 43 bp, Emericella nidulans
gaattcactgcggccgccatggagtttagcgaaaatgaagtga

SEQ ID NO: 30875 - DNA, 39 bp, Emericella nidulans
gttctcgagacgagcgatcgccatgcatgctccaccaac

SEQ ID NO: 30876 - DNA, 47 bp, Emericella nidulans
gaattcactgcggccgccatgagaagacaatattcagatccagttca

SEQ ID NO: 30877 - DNA, 41 bp, Emericella nidulans
gttctcgagacgagcgatcgcatctaccatcggcgtttgag

SEQ ID NO: 30878 - DNA, 41 bp, Emericella nidulans
gaattcactgcggccgccatgcactgactcgccgcctgcac

SEQ ID NO: 30879 - DNA, 49 bp, Emericella nidulans
gttctcgagacgagcgatcgctattgcgttatctgtctttctcctttgg

SEQ ID NO: 30880 - DNA, 46 bp, Emericella nidulans
gaattcactgcggccgccatgaatgtagtcgggaataagagattcg

SEQ ID NO: 30881 - DNA, 41 bp, Emericella nidulans
gttctcgagacgagcgatcgccagtataccgctacggaccc

SEQ ID NO: 30882 - DNA, 49 bp, Emericella nidulans
gaattcactgcggccgccatgtagttactgagcagtccactcacgcaag

SEQ ID NO: 30883 - DNA, 44 bp, Emericella nidulans
gttctcgagacgagcgatcgcgcagtgaagcagctctggggatg

SEQ ID NO: 30884 - DNA, 41 bp, Emericella nidulans
gaattcactgcggccgccatgttaatgagcgacccgaacat

SEQ ID NO: 30885 - DNA, 45 bp, Emericella nidulans
gttctcgagacgagcgatcgcctttaaacacatgtaccgagacaa

SEQ ID NO: 30886 - DNA, 41 bp, Emericella nidulans
gaattcactgcggccgccatgagccggcgatactgtagaaa

SEQ ID NO: 30887 - DNA, 45 bp, Emericella nidulans
gttctcgagacgagcgatcgcgtcacaatgcattgagcctaggta

SEQ ID NO: 30888 - DNA, 41 bp, Emericella nidulans
gaattcactgcggccgccatgaagccaaattgatggcttga

SEQ ID NO: 30889 - DNA, 42 bp, Emericella nidulans
gttctcgagacgagcgatcgccgttgcgaaggatgaagtatt

SEQ ID NO: 30890 - DNA, 45 bp, Emericella nidulans
gaattcactgcggccgccatggcgcttgatccatcgtttatgtga

SEQ ID NO: 30891 - DNA, 43 bp, Emericella nidulans
gttctcgagacgagcgatcgctggcgtgcaacttttgttcagc

SEQ ID NO: 30892 - DNA, 41 bp, Emericella nidulans
gaattcactgcggccgccatggtcgcttccaagatgtaggc

SEQ ID NO: 30893 - DNA, 42 bp, Emericella nidulans
gttctcgagacgagcgatcgctctctagcttccaaggtcatt

SEQ ID NO: 30894 - DNA, 49 bp, Emericella nidulans
gaattcactgcggccgccatgaagctgtacagtggcagtactagcatcc

SEQ ID NO: 30895 - DNA, 43 bp, Emericella nidulans
gttctcgagacgagcgatcgcccccaccaactttcaccgtcca

SEQ ID NO: 30896 - DNA, 48 bp, Emericella nidulans
gaattcactgcggccgccatgtaaagcttgaccctcttgaccctctca

SEQ ID NO: 30897 - DNA, 47 bp, Emericella nidulans
gttctcgagacgagcgatcgctgtatatggaatgccttctcggttgg

SEQ ID NO: 30898 - DNA, 45 bp, Emericella nidulans
gaattcactgcggccgccatgatgagcaagagaagcaggctcaga

SEQ ID NO: 30899 - DNA, 49 bp, Emericella nidulans
gttctcgagacgagcgatcgccggatgtaccttggattaagttcattgc

SEQ ID NO: 30900 - DNA, 49 bp, Emericella nidulans
gaattcactgcggccgccatgcatcaacatgctattttacagtcaccca

SEQ ID NO: 30901 - DNA, 43 bp, Emericella nidulans
gttctcgagacgagcgatcgcgaaatggctgccgaggaggaga

SEQ ID NO: 30902 - DNA, 47 bp, Emericella nidulans
gaattcactgcggccgccatgcagtagagttgcacaaaagcttagtc

SEQ ID NO: 30903 - DNA, 42 bp, Emericella nidulans
gttctcgagacgagcgatcgcgcaaagatttcgcatctaagg

SEQ ID NO: 30904 - DNA, 49 bp, Emericella nidulans
gaattcactgcggccgccatgttgtgcaggcttttcattacacacatga

SEQ ID NO: 30905 - DNA, 41 bp, Emericella nidulans
gttctcgagacgagcgatcgcccgcgacagccctgaacacg

SEQ ID NO: 30906 - DNA, 49 bp, Emericella nidulans
gaattcactgcggccgccatggtgagatttgattgttgttagccccttt

SEQ ID NO: 30907 - DNA, 48 bp, Emericella nidulans
gttctcgagacgagcgatcgcgagcaagacccgtatctctcacctacg

SEQ ID NO: 30908 - DNA, 41 bp, Emericella nidulans
gaattcactgcggccgccatgctgcggcagcttggggtagc

SEQ ID NO: 30909 - DNA, 49 bp, Emericella nidulans
gttctcgagacgagcgatcgcttgtcaagaatcaatccacagtaggtca

SEQ ID NO: 30910 - DNA, 45 bp, Emericella nidulans
gaattcactgcggccgccatgacaaaagcttagtcaatcattaca

SEQ ID NO: 30911 - DNA, 41 bp, Emericella nidulans
gttctcgagacgagcgatcgccgagttgtatgccaagagca

SEQ ID NO: 30912 - DNA, 45 bp, Emericella nidulans
gaattcactgcggccgccatgaaacaagccaaccccagaaagatt

SEQ ID NO: 30913 - DNA, 44 bp, Emericella nidulans
gttctcgagacgagcgatcgctccgaaccgatatcgagcgtttg

SEQ ID NO: 30914 - DNA, 48 bp, Emericella nidulans
gaattcactgcggccgccatgaaaggcaggatgagtataattgcgtca

SEQ ID NO: 30915 - DNA, 45 bp, Emericella nidulans
gttctcgagacgagcgatcgcgctgtataggggctcatcgcagtc

SEQ ID NO: 30916 - DNA, 49 bp, Emericella nidulans
gaattcactgcggccgccatgaggtataacgttggacctttaatgtggg

SEQ ID NO: 30917 - DNA, 41 bp, Emericella nidulans
gttctcgagacgagcgatcgcgctcccatcgaccacgtccc

SEQ ID NO: 30918 - DNA, 46 bp, Emericella nidulans
gaattcactgcggccgccatgcaataggatgcatgcatttctcaca

SEQ ID NO: 30919 - DNA, 41 bp, Emericella nidulans
gttctcgagacgagcgatcgccaactccaatgccgccaacg

SEQ ID NO: 30920 - DNA, 49 bp, Emericella nidulans
gaattcactgcggccgccatgacggatatatatatcaagcccctcacca

SEQ ID NO: 30921 - DNA, 42 bp, Emericella nidulans
gttctcgagacgagcgatcgcctctctcggcgctcgccgtct

SEQ ID NO: 30922 - DNA, 41 bp, Emericella nidulans
gaattcactgcggccgccatgcggcgcaatttttggcaagc

SEQ ID NO: 30923 - DNA, 47 bp, Emericella nidulans
gttctcgagacgagcgatcgcataacccacatcccacgctgtattgc

SEQ ID NO: 30924 - DNA, 49 bp, Emericella nidulans
gaattcactgcggccgccatggatacccgcctatagaaggacagaaatg

SEQ ID NO: 30925 - DNA, 49 bp, Emericella nidulans
gttctcgagacgagcgatcgccagacaaacgagaaaacaacgggatacg

SEQ ID NO: 30926 - DNA, 46 bp, Emericella nidulans
gaattcactgcggccgccatgtcccaactaacgcctaagcaaatcg

SEQ ID NO: 30927 - DNA, 44 bp, Emericella nidulans
gttctcgagacgagcgatcgcgcttgctttggggtcagtgcctc

SEQ ID NO: 30928 - DNA, 44 bp, Emericella nidulans
gaattcactgcggccgccatgccttgttcttacgtatgatgtct

SEQ ID NO: 30929 - DNA, 41 bp, Emericella nidulans
gttctcgagacgagcgatcgcgtgcagcgaccaggtatttt

SEQ ID NO: 30930 - DNA, 49 bp, Emericella nidulans
gaattcactgcggccgccatgtgtatctgcctgaataatatgccagcct

SEQ ID NO: 30931 - DNA, 49 bp, Emericella nidulans
gttctcgagacgagcgatcgctattaaaggccctgaatcagttcaatgg

SEQ ID NO: 30932 - DNA, 47 bp, Emericella nidulans
gaattcactgcggccgccatggctgggtatatatatctaggttctgg

SEQ ID NO: 30933 - DNA, 44 bp, Emericella nidulans
gttctcgagacgagcgatcgcggatactgcaaacagtataaccc

SEQ ID NO: 30934 - DNA, 41 bp, Emericella nidulans
gaattcactgcggccgccatgtaaccctaatcatcggcctc

SEQ ID NO: 30935 - DNA, 41 bp, Emericella nidulans
gttctcgagacgagcgatcgccccgacaacgggtatatttg

SEQ ID NO: 30936 - DNA, 39 bp, Emericella nidulans
gaattcactgcggccgccatgcaaaatccgtcctgccac

SEQ ID NO: 30937 - DNA, 41 bp, Emericella nidulans
gttctcgagacgagcgatcgcatctccgcatcaccagtacc

SEQ ID NO: 30938 - DNA, 43 bp, Emericella nidulans
gaattcactgcggccgccatgggaaaacgctagtgattgctaa

SEQ ID NO: 30939 - DNA, 41 bp, Emericella nidulans
gttctcgagacgagcgatcgcccccgacatcacctgataat

SEQ ID NO: 30940 - DNA, 42 bp, Emericella nidulans
gaattcactgcggccgccatgggatctgattgacttcgagga

SEQ ID NO: 30941 - DNA, 41 bp, Emericella nidulans
gttctcgagacgagcgatcgccgtcaagttctccaggtcgt

SEQ ID NO: 30942 - DNA, 45 bp, Emericella nidulans
gaattcactgcggccgccatgcctagtggtctgtactgttactcg

SEQ ID NO: 30943 - DNA, 41 bp, Emericella nidulans
gttctcgagacgagcgatcgcggatccgtcccagtgaaata

SEQ ID NO: 30944 - DNA, 41 bp, Emericella nidulans
gaattcactgcggccgccatgccgtcgcctctggcgtcttt

SEQ ID NO: 30945 - DNA, 42 bp, Emericella nidulans
gttctcgagacgagcgatcgctcaggcgcattcaacgcaatg

SEQ ID NO: 30946 - DNA, 41 bp, Emericella nidulans
gaattcactgcggccgccatgccgctagcgcagccatcctc

SEQ ID NO: 30947 - DNA, 41 bp, Emericella nidulans
gttctcgagacgagcgatcgcgcacggggacctcgatgagc

SEQ ID NO: 30948 - DNA, 41 bp, Emericella nidulans
gaattcactgcggccgccatgcgttgcgcgaactgggcttc

SEQ ID NO: 30949 - DNA, 41 bp, Emericella nidulans
gttctcgagacgagcgatcgcgcagtccctgggtcggcttg

SEQ ID NO: 30950 - DNA, 41 bp, Emericella nidulans
gaattcactgcggccgccatgttcggcaagatggacgcaga

SEQ ID NO: 30951 - DNA, 41 bp, Emericella nidulans
gttctcgagacgagcgatcgcttgaattcacccgcctcagc

SEQ ID NO: 30952 - DNA, 44 bp, Emericella nidulans
gaattcactgcggccgccatgtgggaataccctgttgctgacga

SEQ ID NO: 30953 - DNA, 41 bp, Emericella nidulans
gttctcgagacgagcgatcgcctgcagggccctgcatttcc

SEQ ID NO: 30954 - DNA, 41 bp, Emericella nidulans
gaattcactgcggccgccatgagtggcgcagccgcactgag

SEQ ID NO: 30955 - DNA, 41 bp, Emericella nidulans
gttctcgagacgagcgatcgccaactgcccacccggtctcc

SEQ ID NO: 30956 - DNA, 41 bp, Emericella nidulans
gaattcactgcggccgccatgctcgtgctcgccccgacttt

SEQ ID NO: 30957 - DNA, 45 bp, Emericella nidulans
gttctcgagacgagcgatcgcgcgatagaacagcgagaccgatca

SEQ ID NO: 30958 - DNA, 41 bp, Emericella nidulans
gaattcactgcggccgccatgtcgcggcttcgatgggaaac

SEQ ID NO: 30959 - DNA, 43 bp, Emericella nidulans
gttctcgagacgagcgatcgctgaccgtgcaagctccagaaca

SEQ ID NO: 30960 - DNA, 43 bp, Emericella nidulans
gaattcactgcggccgccatgcttccgaagacggtgcgtctgg

SEQ ID NO: 30961 - DNA, 42 bp, Emericella nidulans
gttctcgagacgagcgatcgccagtcaccggcaacgatgtgc

SEQ ID NO: 30962 - DNA, 44 bp, Emericella nidulans
gaattcactgcggccgccatgtgatgcacccagtgcctgtactt

SEQ ID NO: 30963 - DNA, 43 bp, Emericella nidulans
gttctcgagacgagcgatcgcgctgcggaagctggtctgaagg

SEQ ID NO: 30964 - DNA, 44 bp, Emericella nidulans
gaattcactgcggccgccatgcagtccttggcaaaggccttgaa

SEQ ID NO: 30965 - DNA, 43 bp, Emericella nidulans
gttctcgagacgagcgatcgctgagctgcagcagcagaggagg

SEQ ID NO: 30966 - DNA, 42 bp, Emericella nidulans
gaattcactgcggccgccatgcatgcctagaagattaagggt

SEQ ID NO: 30967 - DNA, 42 bp, Emericella nidulans
gttctcgagacgagcgatcgctgtcttctgttcaatcaggga

SEQ ID NO: 30968 - DNA, 41 bp, Emericella nidulans
gaattcactgcggccgccatgccgtacgtcaattgaaccct

SEQ ID NO: 30969 - DNA, 39 bp, Emericella nidulans
gttctcgagacgagcgatcgccctcgctgcaaagaagag

SEQ ID NO: 30970 - DNA, 42 bp, Emericella nidulans
gaattcactgcggccgccatgttccacgtctcttgagtagca

SEQ ID NO: 30971 - DNA, 41 bp, Emericella nidulans
gttctcgagacgagcgatcgctgagaccgtgatgagtgagc

SEQ ID NO: 30972 - DNA, 39 bp, Emericella nidulans
gaattcactgcggccgccatgctggttccagggcatcaa

SEQ ID NO: 30973 - DNA, 43 bp, Emericella nidulans
gttctcgagacgagcgatcgctggccataaatcaagaatatga

SEQ ID NO: 30974 - DNA, 47 bp, Emericella nidulans
gaattcactgcggccgccatgctattgttacaacttttgttgctatt

SEQ ID NO: 30975 - DNA, 53 bp, Emericella nidulans
gttctcgagacgagcgatcgcaaaggataaataaagttaatgtagagatagtt

SEQ ID NO: 30976 - DNA, 41 bp, Emericella nidulans
gaattcactgcggccgccatggacaagcgtgacaagcaaga

SEQ ID NO: 30977 - DNA, 41 bp, Emericella nidulans
gttctcgagacgagcgatcgcacttcgcgtaggcaatcagt

SEQ ID NO: 30978 - DNA, 41 bp, Emericella nidulans
gaattcactgcggccgccatgactcgaaagcatccgacact

SEQ ID NO: 30979 - DNA, 41 bp, Emericella nidulans
gttctcgagacgagcgatcgccttctgtcccacagcctctc

SEQ ID NO: 30980 - DNA, 40 bp, Emericella nidulans
gaattcactgcggccgccatgccccctaatgacccagttg

SEQ ID NO: 30981 - DNA, 40 bp, Emericella nidulans
gttctcgagacgagcgatcgcgagtcggccaagtacccac

SEQ ID NO: 30982 - DNA, 41 bp, Emericella nidulans
gaattcactgcggccgccatggctcagaccaggaagatgga

SEQ ID NO: 30983 - DNA, 41 bp, Emericella nidulans
gttctcgagacgagcgatcgcttcgcgggagaagttttcta

SEQ ID NO: 30984 - DNA, 41 bp, Emericella nidulans
gaattcactgcggccgccatggaatcggaaccgcattagtt

SEQ ID NO: 30985 - DNA, 41 bp, Emericella nidulans
gttctcgagacgagcgatcgcgcggtagggatctgcttgat

SEQ ID NO: 30986 - DNA, 42 bp, Emericella nidulans
gaattcactgcggccgccatgatgcgcaatacgggcgtttca

SEQ ID NO: 30987 - DNA, 41 bp, Emericella nidulans
gttctcgagacgagcgatcgctcgcggtatcagccctcacg

SEQ ID NO: 30988 - DNA, 40 bp, Emericella nidulans
gaattcactgcggccgccatgctcgcactcgcccttccct

SEQ ID NO: 30989 - DNA, 46 bp, Emericella nidulans
gttctcgagacgagcgatcgcgagagtagcgtcggtgagctcagta

SEQ ID NO: 30990 - DNA, 45 bp, Emericella nidulans
gaattcactgcggccgccatgccccaatcagaacttttcgcagca

SEQ ID NO: 30991 - DNA, 50 bp, Emericella nidulans
gttctcgagacgagcgatcgctcacaatcccccacatgttagaagtgttg

SEQ ID NO: 30992 - DNA, 44 bp, Emericella nidulans
gaattcactgcggccgccatgaactgggcacagatgacgctcca

SEQ ID NO: 30993 - DNA, 43 bp, Emericella nidulans
gttctcgagacgagcgatcgccgctcagttttcccgtctgaaa

SEQ ID NO: 30994 - DNA, 43 bp, Emericella nidulans
gaattcactgcggccgccatggcgacagcgagcacgaaaaaga

SEQ ID NO: 30995 - DNA, 41 bp, Emericella nidulans
gttctcgagacgagcgatcgctatgcccgccgagccatctc

SEQ ID NO: 30996 - DNA, 43 bp, Emericella nidulans
gaattcactgcggccgccatgtgatcatcaagccgtccccgta

SEQ ID NO: 30997 - DNA, 41 bp, Emericella nidulans
gttctcgagacgagcgatcgctgccgaggccgctccattta

SEQ ID NO: 30998 - DNA, 41 bp, Emericella nidulans
gaattcactgcggccgccatgttcgtctcgcagggcaacca

SEQ ID NO: 30999 - DNA, 40 bp, Emericella nidulans
gttctcgagacgagcgatcgctccaggcctgccatgacca

SEQ ID NO: 31000 - DNA, 43 bp, Emericella nidulans
gaattcactgcggccgccatgcgatttcaaatttgcgccagca

SEQ ID NO: 31001 - DNA, 41 bp, Emericella nidulans
gttctcgagacgagcgatcgctccaggcagcccttcggtgt

SEQ ID NO: 31002 - DNA, 42 bp, Emericella nidulans
gaattcactgcggccgccatgcccggcacgagaacaaacaga

SEQ ID NO: 31003 - DNA, 43 bp, Emericella nidulans
gttctcgagacgagcgatcgctgggccttccttggatccttga

SEQ ID NO: 31004 - DNA, 41 bp, Emericella nidulans
gaattcactgcggccgccatgatgccgctgtatccgcaccc

SEQ ID NO: 31005 - DNA, 42 bp, Emericella nidulans
gttctcgagacgagcgatcgcgcccaatcccacgcccttaaa

SEQ ID NO: 31006 - DNA, 41 bp, Emericella nidulans
gaattcactgcggccgccatgtctccgagtacggaacgatt

SEQ ID NO: 31007 - DNA, 41 bp, Emericella nidulans
gttctcgagacgagcgatcgcgagcctctagctcctcatcg

SEQ ID NO: 31008 - DNA, 41 bp, Emericella nidulans
gaattcactgcggccgccatgatcacccaacaccgaacaat

SEQ ID NO: 31009 - DNA, 41 bp, Emericella nidulans
gttctcgagacgagcgatcgccttggagtgaccgacaacct

SEQ ID NO: 31010 - DNA, 41 bp, Emericella nidulans
gaattcactgcggccgccatggaagtacctccaaggccata

SEQ ID NO: 31011 - DNA, 41 bp, Emericella nidulans
gttctcgagacgagcgatcgccgtaattttgctcgtctcca

SEQ ID NO: 31012 - DNA, 41 bp, Emericella nidulans
gaattcactgcggccgccatgtcaaaggggtgagcttaacg

SEQ ID NO: 31013 - DNA, 41 bp, Emericella nidulans
gttctcgagacgagcgatcgcggcaatgcatcatccataca

SEQ ID NO: 31014 - DNA, 39 bp, Emericella nidulans
gaattcactgcggccgccatgagcgctgtggatgaaagc

SEQ ID NO: 31015 - DNA, 41 bp, Emericella nidulans
gttctcgagacgagcgatcgcacttggatgcgagtttccac

SEQ ID NO: 31016 - DNA, 41 bp, Emericella nidulans
gaattcactgcggccgccatggcaaataatcgcgttccaat

SEQ ID NO: 31017 - DNA, 41 bp, Emericella nidulans
gttctcgagacgagcgatcgctcgggaagctcgacagtatc

SEQ ID NO: 31018 - DNA, 43 bp, Emericella nidulans
gaattcactgcggccgccatgtctaaaggtcctgtgatctcct

SEQ ID NO: 31019 - DNA, 40 bp, Emericella nidulans
gttctcgagacgagcgatcgccagaggtagcctgggcaat

SEQ ID NO: 31020 - DNA, 41 bp, Emericella nidulans
gaattcactgcggccgccatgtctctattttgccgatgcag

SEQ ID NO: 31021 - DNA, 41 bp, Emericella nidulans
gttctcgagacgagcgatcgcttcatccttgaaatgcctcc

SEQ ID NO: 31022 - DNA, 41 bp, Emericella nidulans
gaattcactgcggccgccatggatgtcgcatccgctacttt

SEQ ID NO: 31023 - DNA, 39 bp, Emericella nidulans
gttctcgagacgagcgatcgcgagaacatgcgaccatcg

SEQ ID NO: 31024 - DNA, 41 bp, Emericella nidulans
gaattcactgcggccgccatggtgtccgtatccgcctacac

SEQ ID NO: 31025 - DNA, 41 bp, Emericella nidulans
gttctcgagacgagcgatcgcaagaacaacagcttgacacc

SEQ ID NO: 31026 - DNA, 41 bp, Emericella nidulans
gaattcactgcggccgccatgtacagcacctgtaccgcaag

SEQ ID NO: 31027 - DNA, 41 bp, Emericella nidulans
gttctcgagacgagcgatcgcctcaagcacgcaacagagag

SEQ ID NO: 31028 - DNA, 41 bp, Emericella nidulans
gaattcactgcggccgccatgaggaaattgacgtcgtgaca

SEQ ID NO: 31029 - DNA, 41 bp, Emericella nidulans
gttctcgagacgagcgatcgcgctgtaggcgaatcgaactc

SEQ ID NO: 31030 - DNA, 41 bp, Emericella nidulans
gaattcactgcggccgccatggaacgaggccaaacagaaac

SEQ ID NO: 31031 - DNA, 42 bp, Emericella nidulans
gttctcgagacgagcgatcgcgattgtctttcctcgaagctg

SEQ ID NO: 31032 - DNA, 41 bp, Emericella nidulans
gaattcactgcggccgccatgcaaagggagcaaacggataa

SEQ ID NO: 31033 - DNA, 41 bp, Emericella nidulans
gttctcgagacgagcgatcgcggatttgtcgtctgtgaacg

SEQ ID NO: 31034 - DNA, 41 bp, Emericella nidulans
gaattcactgcggccgccatgaggatccccacaaccaaaat

SEQ ID NO: 31035 - DNA, 43 bp, Emericella nidulans
gttctcgagacgagcgatcgcgtaatgtcatcttcccatggtc

SEQ ID NO: 31036 - DNA, 41 bp, Emericella nidulans
gaattcactgcggccgccatgatcgactgtccgatccatgt

SEQ ID NO: 31037 - DNA, 41 bp, Emericella nidulans
gttctcgagacgagcgatcgcgcagaacagcagaaacagca

SEQ ID NO: 31038 - DNA, 41 bp, Emericella nidulans
gaattcactgcggccgccatgagttcactggcacacagcag

SEQ ID NO: 31039 - DNA, 41 bp, Emericella nidulans
gttctcgagacgagcgatcgccttcaggcaatagttgtggc

SEQ ID NO: 31040 - DNA, 41 bp, Emericella nidulans
gaattcactgcggccgccatgatatcttcggacccccagag

SEQ ID NO: 31041 - DNA, 41 bp, Emericella nidulans
gttctcgagacgagcgatcgccagcattgatctttgcatcg

SEQ ID NO: 31042 - DNA, 41 bp, Emericella nidulans
gaattcactgcggccgccatgtccgtgtctccgtatgtctg

SEQ ID NO: 31043 - DNA, 40 bp, Emericella nidulans
gttctcgagacgagcgatcgcggaccaagagaccgacgat

SEQ ID NO: 31044 - DNA, 42 bp, Emericella nidulans
gaattcactgcggccgccatgagcacaaaaaccttggtactg

SEQ ID NO: 31045 - DNA, 41 bp, Emericella nidulans
gttctcgagacgagcgatcgcccccaaatccgaagctattc

SEQ ID NO: 31046 - DNA, 44 bp, Emericella nidulans
gaattcactgcggccgccatggcaattgtcgacttcttaacagc

SEQ ID NO: 31047 - DNA, 41 bp, Emericella nidulans
gttctcgagacgagcgatcgccccaacaaccccaatagaca

SEQ ID NO: 31048 - DNA, 41 bp, Emericella nidulans
gaattcactgcggccgccatgcgttctaccgggtttagcag

SEQ ID NO: 31049 - DNA, 45 bp, Emericella nidulans
gttctcgagacgagcgatcgctatgtctgtcgaattaaaagaaaa

SEQ ID NO: 31050 - DNA, 40 bp, Emericella nidulans
gaattcactgcggccgccatgcgattgctctcttgaggtc

SEQ ID NO: 31051 - DNA, 41 bp, Emericella nidulans
gttctcgagacgagcgatcgcgtgagttctcgaggctgctt

SEQ ID NO: 31052 - DNA, 42 bp, Emericella nidulans
gaattcactgcggccgccatgcctacatgctcaacaccgata

SEQ ID NO: 31053 - DNA, 41 bp, Emericella nidulans
gttctcgagacgagcgatcgcggagaccttcaacgacaagc

SEQ ID NO: 31054 - DNA, 41 bp, Emericella nidulans
gaattcactgcggccgccatgctgacacccgacagcactac

SEQ ID NO: 31055 - DNA, 41 bp, Emericella nidulans
gttctcgagacgagcgatcgccctagacaggagctggaggc

SEQ ID NO: 31056 - DNA, 41 bp, Emericella nidulans
gaattcactgcggccgccatgtctggagttgtctgcctcag

SEQ ID NO: 31057 - DNA, 41 bp, Emericella nidulans
gttctcgagacgagcgatcgccgtagccactgtctccgata

SEQ ID NO: 31058 - DNA, 41 bp, Emericella nidulans
gaattcactgcggccgccatggcatcgacattgagggacta

SEQ ID NO: 31059 - DNA, 41 bp, Emericella nidulans
gttctcgagacgagcgatcgcgagcttcctggtttgtttgc

SEQ ID NO: 31060 - DNA, 41 bp, Emericella nidulans
gaattcactgcggccgccatgcctgcccgagcaacttacta

SEQ ID NO: 31061 - DNA, 41 bp, Emericella nidulans
gttctcgagacgagcgatcgccgctgtcaaagttgagcttg

SEQ ID NO: 31062 - DNA, 41 bp, Emericella nidulans
gaattcactgcggccgccatgctggtccgctttaccagaag

SEQ ID NO: 31063 - DNA, 41 bp, Emericella nidulans
gttctcgagacgagcgatcgccacgaagggcacatactcct

SEQ ID NO: 31064 - DNA, 42 bp, Emericella nidulans
gaattcactgcggccgccatgtcgaagaagtccgtcctagat

SEQ ID NO: 31065 - DNA, 39 bp, Emericella nidulans
gttctcgagacgagcgatcgcgcgggaatgcaagtgtca

SEQ ID NO: 31066 - DNA, 41 bp, Emericella nidulans
gaattcactgcggccgccatgtgaatggtgcataggctgag

SEQ ID NO: 31067 - DNA, 41 bp, Emericella nidulans
gttctcgagacgagcgatcgctgcatgttccatttgtcacc

SEQ ID NO: 31068 - DNA, 41 bp, Emericella nidulans
gaattcactgcggccgccatggatcccatcatgggagacat

SEQ ID NO: 31069 - DNA, 41 bp, Emericella nidulans
gttctcgagacgagcgatcgcagccgaatcgtttcttttcc

SEQ ID NO: 31070 - DNA, 44 bp, Emericella nidulans
gaattcactgcggccgccatgtcacacatttccactaccctttt

SEQ ID NO: 31071 - DNA, 41 bp, Emericella nidulans
gttctcgagacgagcgatcgcccccttctctcaaactgtgc

SEQ ID NO: 31072 - DNA, 41 bp, Emericella nidulans
gaattcactgcggccgccatgtccgcataaagtcccacttc

SEQ ID NO: 31073 - DNA, 48 bp, Emericella nidulans
gttctcgagacgagcgatcgcattaagtctacaaagaatgtatgttgc

SEQ ID NO: 31074 - DNA, 41 bp, Emericella nidulans
gaattcactgcggccgccatgacttttggggtatccctggt

SEQ ID NO: 31075 - DNA, 41 bp, Emericella nidulans
gttctcgagacgagcgatcgcggatgtcgagcatacggatt

SEQ ID NO: 31076 - DNA, 45 bp, Emericella nidulans
gaattcactgcggccgccatgttggtacgtgtctacaagtgtcct

SEQ ID NO: 31077 - DNA, 41 bp, Emericella nidulans
gttctcgagacgagcgatcgcggtctctccaaaccgtgaaa

SEQ ID NO: 31078 - DNA, 41 bp, Emericella nidulans
gaattcactgcggccgccatgcaaccgcggatctgtaagtt

SEQ ID NO: 31079 - DNA, 41 bp, Emericella nidulans
gttctcgagacgagcgatcgcggtacggagagaggatcgaa

SEQ ID NO: 31080 - DNA, 42 bp, Emericella nidulans
gaattcactgcggccgccatgtgagtttggtcacacatcctg

SEQ ID NO: 31081 - DNA, 41 bp, Emericella nidulans
gttctcgagacgagcgatcgcttctaaccgccgacaactct

SEQ ID NO: 31082 - DNA, 41 bp, Emericella nidulans
gaattcactgcggccgccatgaccaacgtccagttcactcc

SEQ ID NO: 31083 - DNA, 41 bp, Emericella nidulans
gttctcgagacgagcgatcgcttgatgcccttttcaaatcc

SEQ ID NO: 31084 - DNA, 41 bp, Emericella nidulans
gaattcactgcggccgccatgttcaagcctgttccgttatg

SEQ ID NO: 31085 - DNA, 41 bp, Emericella nidulans
gttctcgagacgagcgatcgcaacttcacctccgtcacctg

SEQ ID NO: 31086 - DNA, 41 bp, Emericella nidulans
gaattcactgcggccgccatgcaactcaaagggcactgcat

SEQ ID NO: 31087 - DNA, 41 bp, Emericella nidulans
gttctcgagacgagcgatcgcctcgaatatgcatgcgaaga

SEQ ID NO: 31088 - DNA, 41 bp, Emericella nidulans
gaattcactgcggccgccatgtcgacagcctgtgtctcttc

SEQ ID NO: 31089 - DNA, 41 bp, Emericella nidulans
gttctcgagacgagcgatcgccactggctgtagcaccacac

SEQ ID NO: 31090 - DNA, 40 bp, Emericella nidulans
gaattcactgcggccgccatgcgctttgctgcagcttgta

SEQ ID NO: 31091 - DNA, 44 bp, Emericella nidulans
gttctcgagacgagcgatcgcttcagagcatactcaaaatgtcg

SEQ ID NO: 31092 - DNA, 43 bp, Emericella nidulans
gaattcactgcggccgccatggcttatgaagctggtatctccc

SEQ ID NO: 31093 - DNA, 42 bp, Emericella nidulans
gttctcgagacgagcgatcgccccccttctagctcgataaca

SEQ ID NO: 31094 - DNA, 41 bp, Emericella nidulans
gaattcactgcggccgccatgcaaccgtgcaacagaacaac

SEQ ID NO: 31095 - DNA, 41 bp, Emericella nidulans
gttctcgagacgagcgatcgcgggcaatatgatgacgctct

SEQ ID NO: 31096 - DNA, 41 bp, Emericella nidulans
gaattcactgcggccgccatgcgcataggtcaatcgctctt

SEQ ID NO: 31097 - DNA, 41 bp, Emericella nidulans
gttctcgagacgagcgatcgcgcaaagttgtcaccgacgtt

SEQ ID NO: 31098 - DNA, 41 bp, Emericella nidulans
gaattcactgcggccgccatgaagcaccggagagaagttga

SEQ ID NO: 31099 - DNA, 41 bp, Emericella nidulans
gttctcgagacgagcgatcgcttcgcttgcacctaagatga

SEQ ID NO: 31100 - DNA, 47 bp, Emericella nidulans
gaattcactgcggccgccatgtcatcatggagaaaactactgatctt

SEQ ID NO: 31101 - DNA, 41 bp, Emericella nidulans
gttctcgagacgagcgatcgcacccaatcaactctccaacg

SEQ ID NO: 31102 - DNA, 43 bp, Emericella nidulans
gaattcactgcggccgccatgcaaaaagccaatctctagtcag

SEQ ID NO: 31103 - DNA, 41 bp, Emericella nidulans
gttctcgagacgagcgatcgcccaatatcgccgtctttgtt

SEQ ID NO: 31104 - DNA, 41 bp, Emericella nidulans
gaattcactgcggccgccatgggtggagcggtttcaactat

SEQ ID NO: 31105 - DNA, 41 bp, Emericella nidulans
gttctcgagacgagcgatcgccaaatcctctttgcgaccat

SEQ ID NO: 31106 - DNA, 41 bp, Emericella nidulans
gaattcactgcggccgccatgcgtctttcaacccagcttgt

SEQ ID NO: 31107 - DNA, 40 bp, Emericella nidulans
gttctcgagacgagcgatcgctgacaagacgaccctcagc

SEQ ID NO: 31108 - DNA, 41 bp, Emericella nidulans
gaattcactgcggccgccatggttccaaaacacgcagaaca

SEQ ID NO: 31109 - DNA, 42 bp, Emericella nidulans
gttctcgagacgagcgatcgccgacctatctggtaggccaaa

SEQ ID NO: 31110 - DNA, 41 bp, Emericella nidulans
gaattcactgcggccgccatgaccttacaccggcttcagag

SEQ ID NO: 31111 - DNA, 41 bp, Emericella nidulans
gttctcgagacgagcgatcgccgtggggaaattaagagacg

SEQ ID NO: 31112 - DNA, 41 bp, Emericella nidulans
gaattcactgcggccgccatgatgctgtcttcgccagtgtt

SEQ ID NO: 31113 - DNA, 42 bp, Emericella nidulans
gttctcgagacgagcgatcgcggcctgctctgtatacgtgtc

SEQ ID NO: 31114 - DNA, 41 bp, Emericella nidulans
gaattcactgcggccgccatgatcctgccaaagttgattgc

SEQ ID NO: 31115 - DNA, 41 bp, Emericella nidulans
gttctcgagacgagcgatcgccgagcatagtagctgcgaac

SEQ ID NO: 31116 - DNA, 43 bp, Emericella nidulans
gaattcactgcggccgccatggctattgaaaggcatgtctgag

SEQ ID NO: 31117 - DNA, 41 bp, Emericella nidulans
gttctcgagacgagcgatcgccaccataatgctgaccaacg

SEQ ID NO: 31118 - DNA, 41 bp, Emericella nidulans
gaattcactgcggccgccatgcccctgcaattgaccataat

SEQ ID NO: 31119 - DNA, 41 bp, Emericella nidulans
gttctcgagacgagcgatcgctttgcctcaacatcatctcg

SEQ ID NO: 31120 - DNA, 42 bp, Emericella nidulans
gaattcactgcggccgccatgttctgaccatagtgcaggtcc

SEQ ID NO: 31121 - DNA, 41 bp, Emericella nidulans
gttctcgagacgagcgatcgctgtaggtcccagtgttgctg

SEQ ID NO: 31122 - DNA, 42 bp, Emericella nidulans
gaattcactgcggccgccatgaaaaatatctccgaggactgg

SEQ ID NO: 31123 - DNA, 40 bp, Emericella nidulans
gttctcgagacgagcgatcgcgcctcaggaggaagccata

SEQ ID NO: 31124 - DNA, 41 bp, Emericella nidulans
gaattcactgcggccgccatgttgacaacaagagccgacag

SEQ ID NO: 31125 - DNA, 41 bp, Emericella nidulans
gttctcgagacgagcgatcgcactcgcagcacaaccgtatc

SEQ ID NO: 31126 - DNA, 41 bp, Emericella nidulans
gaattcactgcggccgccatgtactggcgataaggcactcc

SEQ ID NO: 31127 - DNA, 41 bp, Emericella nidulans
gttctcgagacgagcgatcgccgggggttgatacaacgaat

SEQ ID NO: 31128 - DNA, 41 bp, Emericella nidulans
gaattcactgcggccgccatgaccctgggttgtcaatgcta

SEQ ID NO: 31129 - DNA, 41 bp, Emericella nidulans
gttctcgagacgagcgatcgctcccagagactccgaactgt

SEQ ID NO: 31130 - DNA, 41 bp, Emericella nidulans
gaattcactgcggccgccatggcaggcattatggacgaact

SEQ ID NO: 31131 - DNA, 41 bp, Emericella nidulans
gttctcgagacgagcgatcgccgtgcagtttctcagcttca

SEQ ID NO: 31132 - DNA, 41 bp, Emericella nidulans; identical to SEQ ID NO: 31130

SEQ ID NO: 31133 - DNA, 41 bp, Emericella nidulans; identical to SEQ ID NO: 31131

SEQ ID NO: 31134 - DNA, 41 bp, Emericella nidulans
gaattcactgcggccgccatgaccccgacaatgtctcgtta

SEQ ID NO: 31135 - DNA, 45 bp, Emericella nidulans
gttctcgagacgagcgatcgcttggtcaggatgatatctgaattt

SEQ ID NO: 31136 - DNA, 44 bp, Emericella nidulans
gaattcactgcggccgccatgcgtattgacgagtaataggaggc

SEQ ID NO: 31137 - DNA, 41 bp, Emericella nidulans
gttctcgagacgagcgatcgcgatggctcaaccacactgag

SEQ ID NO: 31138 - DNA, 47 bp, Emericella nidulans
gaattcactgcggccgccatgggtcaagtcttgtataatgcaacttt

SEQ ID NO: 31139 - DNA, 39 bp, Emericella nidulans
gttctcgagacgagcgatcgcaaaggcgctcccctggta

SEQ ID NO: 31140 - DNA, 41 bp, Emericella nidulans
gaattcactgcggccgccatggaacaacatggcaccacaag

SEQ ID NO: 31141 - DNA, 46 bp, Emericella nidulans
gttctcgagacgagcgatcgccctgtaagtcctcagtatccttctt

SEQ ID NO: 31142 - DNA, 41 bp, Emericella nidulans
gaattcactgcggccgccatgggctggatgggtatgctaag

SEQ ID NO: 31143 - DNA, 41 bp, Emericella nidulans
gttctcgagacgagcgatcgctgcgcgttaacaccatgtat

SEQ ID NO: 31144 - DNA, 42 bp, Emericella nidulans
gaattcactgcggccgccatgcaaaaatcggaattacgcaaa

SEQ ID NO: 31145 - DNA, 41 bp, Emericella nidulans
gttctcgagacgagcgatcgcttgcggcctacttcaatagc

SEQ ID NO: 31146 - DNA, 41 bp, Emericella nidulans
gaattcactgcggccgccatgcgcagccacgggcgagatac

SEQ ID NO: 31147 - DNA, 41 bp, Emericella nidulans
gttctcgagacgagcgatcgctacgatcgcctcgctgtccc

SEQ ID NO: 31148 - DNA, 42 bp, Emericella nidulans
gaattcactgcggccgccatgcccttgatcaagccgctgagg

SEQ ID NO: 31149 - DNA, 40 bp, Emericella nidulans
gttctcgagacgagcgatcgccagtgccgccctcgtcatc

SEQ ID NO: 31150 - DNA, 41 bp, Emericella nidulans
gaattcactgcggccgccatgggtgggccttgacgggacct

SEQ ID NO: 31151 - DNA, 41 bp, Emericella nidulans
gttctcgagacgagcgatcgcacgcagcaaattcggatgga

SEQ ID NO: 31152 - DNA, 52 bp, Emericella nidulans
gaattcactgcggccgccatggagatcatgaaattctgcaacagacacaagc

SEQ ID NO: 31153 - DNA, 41 bp, Emericella nidulans
gttctcgagacgagcgatcgcgcaggctcgacggagctcaa

SEQ ID NO: 31154 - DNA, 41 bp, Emericella nidulans
gaattcactgcggccgccatgctgcctacgcgcgtcgaacc

SEQ ID NO: 31155 - DNA, 45 bp, Emericella nidulans
gttctcgagacgagcgatcgctcctcattccgcctaatcctgcaa

SEQ ID NO: 31156 - DNA, 43 bp, Emericella nidulans
gaattcactgcggccgccatggctctggaggaacgacgcaagg

SEQ ID NO: 31157 - DNA, 41 bp, Emericella nidulans
gttctcgagacgagcgatcgcaagggcttgggaccccgcta

SEQ ID NO: 31158 - DNA, 43 bp, Emericella nidulans
gaattcactgcggccgccatgtgaagctcacctccccctctca

SEQ ID NO: 31159 - DNA, 43 bp, Emericella nidulans
gttctcgagacgagcgatcgccctcgggggtgaaccagagacc

SEQ ID NO: 31160 - DNA, 53 bp, Emericella nidulans
gaattcactgcggccgccatgcagcaatcgaacaaaagtagaagtgaatgagg

SEQ ID NO: 31161 - DNA, 41 bp, Emericella nidulans
gttctcgagacgagcgatcgccgccgctttcaagtcgctga

SEQ ID NO: 31162 - DNA, 43 bp, Emericella nidulans
gaattcactgcggccgccatgggtcttcgaccggtttcccaag

SEQ ID NO: 31163 - DNA, 49 bp, Emericella nidulans
gttctcgagacgagcgatcgctggagttaagaaactggaagggcattca

SEQ ID NO: 31164 - DNA, 53 bp, Emericella nidulans
gaattcactgcggccgccatgatattatccatctaccctcactaaccgtttgc

SEQ ID NO: 31165 - DNA, 47 bp, Emericella nidulans
gttctcgagacgagcgatcgcataccggaactccttgaccttcttcg

SEQ ID NO: 31166 - DNA, 45 bp, Emericella nidulans
gaattcactgcggccgccatgccccagcatccagtatggttcaca

SEQ ID NO: 31167 - DNA, 41 bp, Emericella nidulans
gttctcgagacgagcgatcgctccaccttgctcaggccctc

SEQ ID NO: 31168 - DNA, 41 bp, Emericella nidulans
gaattcactgcggccgccatgcactgcgcgaaggcggtagg

SEQ ID NO: 31169 - DNA, 42 bp, Emericella nidulans
gttctcgagacgagcgatcgccggcaggtgtaaccgccatca

SEQ ID NO: 31170 - DNA, 45 bp, Emericella nidulans
gaattcactgcggccgccatggaagaaaggaggacactgcgaaga

SEQ ID NO: 31171 - DNA, 41 bp, Emericella nidulans
gttctcgagacgagcgatcgccgtcgtcctgggcccctaca

SEQ ID NO: 31172 - DNA, 41 bp, Emericella nidulans
gaattcactgcggccgccatgcgagctgcgcgtgtctctcc

SEQ ID NO: 31173 - DNA, 41 bp, Emericella nidulans
gttctcgagacgagcgatcgcctggtagacgcccggcctga

SEQ ID NO: 31174 - DNA, 41 bp, Emericella nidulans
gaattcactgcggccgccatgccttcccggacgctgatgga

SEQ ID NO: 31175 - DNA, 43 bp, Emericella nidulans
gttctcgagacgagcgatcgccctggccagtacgtggcgctta

SEQ ID NO: 31176 - DNA, 45 bp, Emericella nidulans
gaattcactgcggccgccatgcccttcctgaaactgtccgtgtgc

SEQ ID NO: 31177 - DNA, 41 bp, Emericella nidulans
gttctcgagacgagcgatcgcaacgggcagtgcacccttgc

SEQ ID NO: 31178 - DNA, 43 bp, Emericella nidulans
gaattcactgcggccgccatgcatcgagacccaggcgttcttg

SEQ ID NO: 31179 - DNA, 42 bp, Emericella nidulans
gttctcgagacgagcgatcgccgatcgcgatcatgagggaat

SEQ ID NO: 31180 - DNA, 45 bp, Emericella nidulans
gaattcactgcggccgccatgtggacggccatacgaagtttccct

SEQ ID NO: 31181 - DNA, 42 bp, Emericella nidulans
gttctcgagacgagcgatcgcgcaggcatcgggtgcatcagt

SEQ ID NO: 31182 - DNA, 41 bp, Emericella nidulans
gaattcactgcggccgccatgacgcggcgtcacccaatctt

SEQ ID NO: 31183 - DNA, 42 bp, Emericella nidulans
gttctcgagacgagcgatcgcgcgcgctccaaaccgtactca

SEQ ID NO: 31184 - DNA, 41 bp, Emericella nidulans
gaattcactgcggccgccatggcgcaacggcttcgatcgtt

SEQ ID NO: 31185 - DNA, 42 bp, Emericella nidulans
gttctcgagacgagcgatcgcgccctgcatgatatgcgacca

SEQ ID NO: 31186 - DNA, 43 bp, Emericella nidulans
gaattcactgcggccgccatgcgcaatctccaggacgccatgt

SEQ ID NO: 31187 - DNA, 42 bp, Emericella nidulans
gttctcgagacgagcgatcgcgcagcaggcatgcggactgtt

SEQ ID NO: 31188 - DNA, 41 bp, Emericella nidulans
gaattcactgcggccgccatggccgcaggcccatcacagtc

SEQ ID NO: 31189 - DNA, 44 bp, Emericella nidulans
gttctcgagacgagcgatcgcgcccacctgctgcaagtagagga

SEQ ID NO: 31190 - DNA, 46 bp, Emericella nidulans
gaattcactgcggccgccatggcaatttagtgtgctccgacttgct

SEQ ID NO: 31191 - DNA, 41 bp, Emericella nidulans
gttctcgagacgagcgatcgctgttgcgacgctggccttgt

SEQ ID NO: 31192 - DNA, 51 bp, Emericella nidulans
gaattcactgcggccgccatggagaccatgatggatgtgtttaacttctca

SEQ ID NO: 31193 - DNA, 41 bp, Emericella nidulans
gttctcgagacgagcgatcgcggtttccaggggccgaatgc

SEQ ID NO: 31194 - DNA, 43 bp, Emericella nidulans
gaattcactgcggccgccatggccgccagtatcgtttccaccc

SEQ ID NO: 31195 - DNA, 41 bp, Emericella nidulans
gttctcgagacgagcgatcgcccaccaacagccagggcaca

SEQ ID NO: 31196 - DNA, 41 bp, Emericella nidulans
gaattcactgcggccgccatgctcgccctccagcaacaccc

SEQ ID NO: 31197 - DNA, 39 bp, Emericella nidulans
gttctcgagacgagcgatcgccgcggcactgcgagcgta

SEQ ID NO: 31198 - DNA, 41 bp, Emericella nidulans
gaattcactgcggccgccatgcgagccgggctctcctgaac

SEQ ID NO: 31199 - DNA, 41 bp, Emericella nidulans
gttctcgagacgagcgatcgctcggggctagactgccatcg

SEQ ID NO: 31200 - DNA, 41 bp, Emericella nidulans
gaattcactgcggccgccatgaggcgtgcgagctcgatgtg

SEQ ID NO: 31201 - DNA, 41 bp, Emericella nidulans
gttctcgagacgagcgatcgcctccagtccccgctcgttgg

SEQ ID NO: 31202 - DNA, 41 bp, Emericella nidulans
gaattcactgcggccgccatgtcatccgtgggcctggtgtg

SEQ ID NO: 31203 - DNA, 52 bp, Emericella nidulans
gttctcgagacgagcgatcgcgcaggttagtgtcgtattagactgggccata

SEQ ID NO: 31204 - DNA, 47 bp, Emericella nidulans
gaattcactgcggccgccatgcaaccttatggctgtcgaaggcactc

SEQ ID NO: 31205 - DNA, 41 bp, Emericella nidulans
gttctcgagacgagcgatcgcggctcgcgctcgatctccct

SEQ ID NO: 31206 - DNA, 42 bp, Emericella nidulans
gaattcactgcggccgccatggggccaaattgaccggacgag

SEQ ID NO: 31207 - DNA, 44 bp, Emericella nidulans
gttctcgagacgagcgatcgctcaacttggttctgaggcgctga

SEQ ID NO: 31208 - DNA, 41 bp, Emericella nidulans
gaattcactgcggccgccatgccacgcgatgcacaccaagc

SEQ ID NO: 31209 - DNA, 53 bp, Emericella nidulans
gttctcgagacgagcgatcgccatgaattctcccttccagatagaaactatgg

SEQ ID NO: 31210 - DNA, 42 bp, Emericella nidulans
gaattcactgcggccgccatgcacctttgtcgacggagtgga

SEQ ID NO: 31211 - DNA, 40 bp, Emericella nidulans
gttctcgagacgagcgatcgcccgccgcgcagctgaaaat

SEQ ID NO: 31212 - DNA, 43 bp, Emericella nidulans
gaattcactgcggccgccatgcgcagtgcaacttcaccgaggg

SEQ ID NO: 31213 - DNA, 40 bp, Emericella nidulans
gttctcgagacgagcgatcgcgagctggcgcccacccaag

SEQ ID NO: 31214 - DNA, 41 bp, Emericella nidulans
gaattcactgcggccgccatggacaaacacggctgcgtgga

SEQ ID NO: 31215 - DNA, 41 bp, Emericella nidulans
gttctcgagacgagcgatcgcccgcgggttcacctcgaaga

SEQ ID NO: 31216 - DNA, 46 bp, Emericella nidulans
gaattcactgcggccgccatgtcctcgagttcgacgtcacaaaagc

SEQ ID NO: 31217 - DNA, 41 bp, Emericella nidulans
gttctcgagacgagcgatcgcccgggctcgacgatgaggac

SEQ ID NO: 31218 - DNA, 41 bp, Emericella nidulans
gaattcactgcggccgccatgttcgttgccgcttgccttcc

SEQ ID NO: 31219 - DNA, 41 bp, Emericella nidulans
gttctcgagacgagcgatcgctctccgggctcacaccagca

SEQ ID NO: 31220 - DNA, 47 bp, Emericella nidulans
gaattcactgcggccgccatgttccaaacttcagtcactgcgcacaa

SEQ ID NO: 31221 - DNA, 52 bp, Emericella nidulans
gttctcgagacgagcgatcgcaaagacgttctctaacaaagattccccctca

SEQ ID NO: 31222 - DNA, 45 bp, Emericella nidulans
gaattcactgcggccgccatgtgggttatgtctaggcggagggtg

SEQ ID NO: 31223 - DNA, 45 bp, Emericella nidulans
gttctcgagacgagcgatcgcctttctttccattccggctttctc

SEQ ID NO: 31224 - DNA, 51 bp, Emericella nidulans
gaattcactgcggccgccatgtcctcaccttcagctataaatccaacaaca

SEQ ID NO: 31225 - DNA, 41 bp, Emericella nidulans
gttctcgagacgagcgatcgcagagcgtccgcgtgtgcgta

SEQ ID NO: 31226 - DNA, 55 bp, Emericella nidulans
gaattcactgcggccgccatgaacactagtgcagtatcaacagactctggtctca

SEQ ID NO: 31227 - DNA, 41 bp, Emericella nidulans
gttctcgagacgagcgatcgctgcgaagattcgccttgctg

SEQ ID NO: 31228 - DNA, 53 bp, Emericella nidulans
gaattcactgcggccgccatgattcattgaaagtatatagcgtggtccttgac

SEQ ID NO: 31229 - DNA, 54 bp, Emericella nidulans
gttctcgagacgagcgatcgctagaaaaaggaaagaaaactcaacttacctcaa

SEQ ID NO: 31230 - DNA, 42 bp, Emericella nidulans
gaattcactgcggccgccatgcgccattcaagagccagcacc

SEQ ID NO: 31231 - DNA, 48 bp, Emericella nidulans
gttctcgagacgagcgatcgctgactttcttcgctgcatcttcaaagc

SEQ ID NO: 31232 - DNA, 41 bp, Emericella nidulans
gaattcactgcggccgccatgccccgatgtgcgaggttcac

SEQ ID NO: 31233 - DNA, 46 bp, Emericella nidulans
gttctcgagacgagcgatcgcgacgcgaggtcattagagaatgatg

SEQ ID NO: 31234 - DNA, 41 bp, Emericella nidulans
gaattcactgcggccgccatggctctccttgcccgccatgc

SEQ ID NO: 31235 - DNA, 43 bp, Emericella nidulans
gttctcgagacgagcgatcgccacttccccaccaatccgttcg

SEQ ID NO: 31236 - DNA, 42 bp, Emericella nidulans
gaattcactgcggccgccatgtcgtgctccaaaatggcatga

SEQ ID NO: 31237 - DNA, 44 bp, Emericella nidulans
gttctcgagacgagcgatcgctctcgcctagggttggcatcaca

SEQ ID NO: 31238 - DNA, 43 bp, Emericella nidulans
gaattcactgcggccgccatgcgctgccgaatactacgcctcc

SEQ ID NO: 31239 - DNA, 41 bp, Emericella nidulans
gttctcgagacgagcgatcgcgcgacgacgccaacagcaag

SEQ ID NO: 31240 - DNA, 50 bp, Emericella nidulans
gaattcactgcggccgccatgacatggaagtatactccggcttctgtgtg

SEQ ID NO: 31241 - DNA, 43 bp, Emericella nidulans
gttctcgagacgagcgatcgctcccgccttcttcatccgtagg

SEQ ID NO: 31242 - DNA, 47 bp, Emericella nidulans
gaattcactgcggccgccatgatgaaagcttcgccaaacttcctgtt

SEQ ID NO: 31243 - DNA, 46 bp, Emericella nidulans
gttctcgagacgagcgatcgcggacacatcactggcccagagaaaa

SEQ ID NO: 31244 - DNA, 43 bp, Emericella nidulans
gaattcactgcggccgccatgtggtgtacgtcctttccatccc

SEQ ID NO: 31245 - DNA, 41 bp, Emericella nidulans
gttctcgagacgagcgatcgcgctgcccgtgcaggaacgta

SEQ ID NO: 31246 - DNA, 55 bp, Emericella nidulans
gaattcactgcggccgccatgtacctattagaccaggttcaagaacactccaagg

SEQ ID NO: 31247 - DNA, 42 bp, Emericella nidulans
gttctcgagacgagcgatcgcgcagggcatgggaatgaaacg

SEQ ID NO: 31248 - DNA, 53 bp, Emericella nidulans
gaattcactgcggccgccatgctactatgacccagtacaagaccgattacacc

SEQ ID NO: 31249 - DNA, 57 bp, Emericella nidulans
gttctcgagacgagcgatcgctatactagtatcttgattggattgcaaaacttaccc

SEQ ID NO: 31250 - DNA, 42 bp, Emericella nidulans
gaattcactgcggccgccatgcgctaatgaggcccatgttca

SEQ ID NO: 31251 - DNA, 48 bp, Emericella nidulans
gttctcgagacgagcgatcgctcacgctgttctcattaccatcaaccc

SEQ ID NO: 31252 - DNA, 41 bp, Emericella nidulans
gaattcactgcggccgccatgcgctctccggcgctcatcaa

SEQ ID NO: 31253 - DNA, 50 bp, Emericella nidulans
gttctcgagacgagcgatcgcatccttcttgggcttcttggtaccatact

SEQ ID NO: 31254 - DNA, 41 bp, Emericella nidulans
gaattcactgcggccgccatgaggaaaggccccacgccctc

SEQ ID NO: 31255 - DNA, 46 bp, Emericella nidulans
gttctcgagacgagcgatcgccggcgatacttgtcataatcgcaga

SEQ ID NO: 31256 - DNA, 48 bp, Emericella nidulans
gaattcactgcggccgccatgcgattgtgagaaggagttcaagaacga

SEQ ID NO: 31257 - DNA, 41 bp, Emericella nidulans
gttctcgagacgagcgatcgcaatgcgcgacggcccatgta

SEQ ID NO: 31258 - DNA, 45 bp, Emericella nidulans
gaattcactgcggccgccatgcccccacaacttctactggccttg

SEQ ID NO: 31259 - DNA, 41 bp, Emericella nidulans
gttctcgagacgagcgatcgccggcgcttcgaatcggcttt

SEQ ID NO: 31260 - DNA, 42 bp, Emericella nidulans
gaattcactgcggccgccatgtccctgcgcgtatgaccgcta

SEQ ID NO: 31261 - DNA, 53 bp, Emericella nidulans
gttctcgagacgagcgatcgctctattgatcagagagaatttcaccgttttcc

SEQ ID NO: 31262 - DNA, 41 bp, Emericella nidulans
gaattcactgcggccgccatgtgccgaacgtcgggaagtca

SEQ ID NO: 31263 - DNA, 41 bp, Emericella nidulans
gttctcgagacgagcgatcgccccgacgacgtcgctcttcc

SEQ ID NO: 31264 - DNA, 42 bp, Emericella nidulans
gaattcactgcggccgccatgcgatgggtcatcaccggcaaa

SEQ ID NO: 31265 - DNA, 42 bp, Emericella nidulans
gttctcgagacgagcgatcgccctttcccgtcgctcctttgg

SEQ ID NO: 31266 - DNA, 50 bp, Emericella nidulans
gaattcactgcggccgccatggctcttctcgcagtttgaagctaatgtcg

SEQ ID NO: 31267 - DNA, 56 bp, Emericella nidulans
gttctcgagacgagcgatcgctaaggttgtacaacctggatattattctttttctg

SEQ ID NO: 31268 - DNA, 39 bp, Emericella nidulans
gaattcactgcggccgccatgccgctgcgagcgagtggt

SEQ ID NO: 31269 - DNA, 41 bp, Emericella nidulans
gttctcgagacgagcgatcgcgctgaagccgccgttgctgt

SEQ ID NO: 31270 - DNA, 53 bp, Emericella nidulans
gaattcactgcggccgccatgcagagattcaagtcacctctcgacagataccc

SEQ ID NO: 31271 - DNA, 45 bp, Emericella nidulans
gttctcgagacgagcgatcgccagcgcaggtccatctttcccata

SEQ ID NO: 31272 - DNA, 45 bp, Emericella nidulans
gaattcactgcggccgccatgtgtggattgatgcggaacaacaga

SEQ ID NO: 31273 - DNA, 50 bp, Emericella nidulans
gttctcgagacgagcgatcgcttgagttgtatgccaatatctcgcagctt

SEQ ID NO: 31274 - DNA, 49 bp, Emericella nidulans
gaattcactgcggccgccatggctacaccagctgagactttgaaggagg

SEQ ID NO: 31275 - DNA, 41 bp, Emericella nidulans
gttctcgagacgagcgatcgccggggaccggcgttgtttct

SEQ ID NO: 31276 - DNA, 49 bp, Emericella nidulans
gaattcactgcggccgccatgcggcagattaccatatcaagggcaaaac

SEQ ID NO: 31277 - DNA, 53 bp, Emericella nidulans
gttctcgagacgagcgatcgccgagatgatgattttcgatcattttactttgc

SEQ ID NO: 31278 - DNA, 43 bp, Emericella nidulans
gaattcactgcggccgccatggccatttcttccccaacgctcc

SEQ ID NO: 31279 - DNA, 52 bp, Emericella nidulans
gttctcgagacgagcgatcgcgtaccagtacacacctttctggtcaccttcc

SEQ ID NO: 31280 - DNA, 41 bp, Emericella nidulans; identical to SEQ ID NO: 30356

SEQ ID NO: 31281 - DNA, 53 bp, Emericella nidulans
gttctcgagacgagcgatcgcggcaagagttaaatataccgtgaggcgtcata

SEQ ID NO: 31282 - DNA, 41 bp, Emericella nidulans
gaattcactgcggccgccatgttggtgggtgtgcagggtgc

SEQ ID NO: 31283 - DNA, 48 bp, Emericella nidulans
gttctcgagacgagcgatcgctttttcgtacgtagccattagagagcc

SEQ ID NO: 31284 - DNA, 47 bp, Emericella nidulans
gaattcactgcggccgccatgcagtcgcaactggcttaaggtaaaaa

SEQ ID NO: 31285 - DNA, 41 bp, Emericella nidulans
gttctcgagacgagcgatcgccgccacagcctcctgcttcc

SEQ ID NO: 31286 - DNA, 40 bp, Emericella nidulans
gaattcactgcggccgccatggtcggcgaacaccagagcc

SEQ ID NO: 31287 - DNA, 44 bp, Emericella nidulans
gttctcgagacgagcgatcgcggaaagaagcctctccacgcctc

SEQ ID NO: 31288 - DNA, 41 bp, Emericella nidulans
gaattcactgcggccgccatgacgcggcccatattcgaggc

SEQ ID NO: 31289 - DNA, 41 bp, Emericella nidulans
gttctcgagacgagcgatcgctttccgcaccgggtttctgc

SEQ ID NO: 31290 - DNA, 46 bp, Emericella nidulans
gaattcactgcggccgccatgggtggttccattttgactggtgtcc

SEQ ID NO: 31291 - DNA, 43 bp, Emericella nidulans
gttctcgagacgagcgatcgcccaaccaatcaaacgccagtgc

SEQ ID NO: 31292 - DNA, 41 bp, Emericella nidulans
gaattcactgcggccgccatgtcctcctcacgaccccaacc

SEQ ID NO: 31293 - DNA, 48 bp, Emericella nidulans
gttctcgagacgagcgatcgcccctcttcttgtttttgttgcctttgc

SEQ ID NO: 31294 - DNA, 55 bp, Emericella nidulans
gaattcactgcggccgccatgtctgctactacattttatgacttcgagcctgttg

SEQ ID NO: 31295 - DNA, 43 bp, Emericella nidulans
gttctcgagacgagcgatcgctggtggtactagcccacctccc

SEQ ID NO: 31296 - DNA, 41 bp, Emericella nidulans
gaattcactgcggccgccatgtgcacgcggtgaacagagca

SEQ ID NO: 31297 - DNA, 42 bp, Emericella nidulans
gttctcgagacgagcgatcgcgcccacattccatggggtgaa

SEQ ID NO: 31298 - DNA, 41 bp, Emericella nidulans
gaattcactgcggccgccatgtggcgatgcgacatcaaagg

SEQ ID NO: 31299 - DNA, 42 bp, Emericella nidulans
gttctcgagacgagcgatcgctcttggcaacggcgtacacga

SEQ ID NO: 31300 - DNA, 43 bp, Emericella nidulans
gaattcactgcggccgccatgggtcacgagtttttcgcggagg

SEQ ID NO: 31301 - DNA, 42 bp, Emericella nidulans
gttctcgagacgagcgatcgccagccgaatgtggtgccgaag

SEQ ID NO: 31302 - DNA, 43 bp, Emericella nidulans
gaattcactgcggccgccatgtcattccaaaccgctctgtggg

SEQ ID NO: 31303 - DNA, 41 bp, Emericella nidulans
gttctcgagacgagcgatcgctcctccgttgcgctccgttc

SEQ ID NO: 31304 - DNA, 50 bp, Emericella nidulans
gaattcactgcggccgccatgatccgatcaatcgaatagtacggaactgg

SEQ ID NO: 31305 - DNA, 41 bp, Emericella nidulans
gttctcgagacgagcgatcgctccgcaggtcccatggcttc

SEQ ID NO: 31306 - DNA, 41 bp, Emericella nidulans
gaattcactgcggccgccatgggtgctctcgcgccaattcc

SEQ ID NO: 31307 - DNA, 41 bp, Emericella nidulans
gttctcgagacgagcgatcgccgtgagttgcgtgcggcttc

SEQ ID NO: 31308 - DNA, 52 bp, Emericella nidulans
gaattcactgcggccgccatggatatagatatgccgtctcgtactttcttcc

SEQ ID NO: 31309 - DNA, 49 bp, Emericella nidulans
gttctcgagacgagcgatcgcggtctgtaggcacatcaacaacctttcc

SEQ ID NO: 31310 - DNA, 44 bp, Emericella nidulans
gaattcactgcggccgccatgggtcaagccggctctgtatcagc

SEQ ID NO: 31311 - DNA, 41 bp, Emericella nidulans
gttctcgagacgagcgatcgccctgaccccgatcggacacc

SEQ ID NO: 31312 - DNA, 41 bp, Emericella nidulans
gaattcactgcggccgccatgacgacgctcgcacagtgctc

SEQ ID NO: 31313 - DNA, 43 bp, Emericella nidulans
gttctcgagacgagcgatcgcccctgtatcagtcgcagcccac

SEQ ID NO: 31314 - DNA, 41 bp, Emericella nidulans
gaattcactgcggccgccatgcaggcggtcgctcagctcaa

SEQ ID NO: 31315 - DNA, 41 bp, Emericella nidulans
gttctcgagacgagcgatcgccaacccgttcgccagcttcg

SEQ ID NO: 31316 - DNA, 42 bp, Emericella nidulans
gaattcactgcggccgccatgcgctcgcacaataaccgcacc

SEQ ID NO: 31317 - DNA, 43 bp, Emericella nidulans
gttctcgagacgagcgatcgcgacacatgccatcaacgctcca

SEQ ID NO: 31318 - DNA, 46 bp, Emericella nidulans
gaattcactgcggccgccatggctgatcaagcaaggtttggtgaca

SEQ ID NO: 31319 - DNA, 54 bp, Emericella nidulans
gttctcgagacgagcgatcgcgacaacttatctacttgggaccaacagcttcaa

SEQ ID NO: 31320 - DNA, 42 bp, Emericella nidulans
gaattcactgcggccgccatgccaaaacattgccgccagcag

SEQ ID NO: 31321 - DNA, 46 bp, Emericella nidulans
gttctcgagacgagcgatcgcgggttagtccacgaaccaacaacga

SEQ ID NO: 31322 - DNA, 52 bp, Emericella nidulans
gaattcactgcggccgccatgaaaagctaacctacacctccttgaaggaaaa

SEQ ID NO: 31323 - DNA, 41 bp, Emericella nidulans
gttctcgagacgagcgatcgccccccttcggcattccgttc

SEQ ID NO: 31324 - DNA, 54 bp, Emericella nidulans
gaattcactgcggccgccatggaaactatttctaaggcgtatggaaaccaggct

SEQ ID NO: 31325 - DNA, 43 bp, Emericella nidulans
gttctcgagacgagcgatcgcggctcgaatcgtcgaacaagga

SEQ ID NO: 31326 - DNA, 46 bp, Emericella nidulans
gaattcactgcggccgccatgtcttgctgactcgcatagctcctca

SEQ ID NO: 31327 - DNA, 43 bp, Emericella nidulans
gttctcgagacgagcgatcgcgctgggcttaatccgctggctc

SEQ ID NO: 31328 - DNA, 41 bp, Emericella nidulans
gaattcactgcggccgccatgcggctgggcgaagattgtgc

SEQ ID NO: 31329 - DNA, 42 bp, Emericella nidulans
gttctcgagacgagcgatcgccgtcatggcgttggtcatgga

SEQ ID NO: 31330 - DNA, 41 bp, Emericella nidulans
gaattcactgcggccgccatgtgcgggcaagaactgggtca

SEQ ID NO: 31331 - DNA, 41 bp, Emericella nidulans
gttctcgagacgagcgatcgctagtgggggcagcggaggtg

SEQ ID NO: 31332 - DNA, 46 bp, Emericella nidulans
gaattcactgcggccgccatgggtgtgttcatgggtttgaattctg

SEQ ID NO: 31333 - DNA, 41 bp, Emericella nidulans
gttctcgagacgagcgatcgcaaggccgccttcgttgatgg

SEQ ID NO: 31334 - DNA, 41 bp, Emericella nidulans
gaattcactgcggccgccatggctgcctcggggattgatcg

SEQ ID NO: 31335 - DNA, 47 bp, Emericella nidulans
gttctcgagacgagcgatcgcgcaatccccatcgaatcataatctgc

SEQ ID NO: 31336 - DNA, 43 bp, Emericella nidulans
gaattcactgcggccgccatgccgaagttaccggcgaaggtcc

SEQ ID NO: 31337 - DNA, 54 bp, Emericella nidulans
gttctcgagacgagcgatcgcatcgcgatgtttctcattcaaatctaataagtg

SEQ ID NO: 31338 - DNA, 49 bp, Emericella nidulans
gaattcactgcggccgccatgcattaagatgcaatgtcgacttgttgaa

SEQ ID NO: 31339 - DNA, 42 bp, Emericella nidulans
gttctcgagacgagcgatcgctgcgatgtcctgaagcccaga

SEQ ID NO: 31340 - DNA, 41 bp, Emericella nidulans
gaattcactgcggccgccatggcttcgaatccgctgccaga

SEQ ID NO: 31341 - DNA, 50 bp, Emericella nidulans
gttctcgagacgagcgatcgcagccaacataaacttaaacaaggcatcca

SEQ ID NO: 31342 - DNA, 45 bp, Emericella nidulans
gaattcactgcggccgccatgtcccgtctcgttgagaaaatgcaa

SEQ ID NO: 31343 - DNA, 43 bp, Emericella nidulans
gttctcgagacgagcgatcgccgtcgcaacagcattgcccata

SEQ ID NO: 31344 - DNA, 42 bp, Emericella nidulans
gaattcactgcggccgccatgtccagctgcaccacctccacc

SEQ ID NO: 31345 - DNA, 41 bp, Emericella nidulans
gttctcgagacgagcgatcgcgcgctgagatccaacggcac

SEQ ID NO: 31346 - DNA, 41 bp, Emericella nidulans
gaattcactgcggccgccatgccttgcgaccggggtctacg

SEQ ID NO: 31347 - DNA, 41 bp, Emericella nidulans
gttctcgagacgagcgatcgcacgtgaatgcgagcgcgaga

SEQ ID NO: 31348 - DNA, 41 bp, Emericella nidulans
gaattcactgcggccgccatggccagacgcgacgcaaagag

SEQ ID NO: 31349 - DNA, 46 bp, Emericella nidulans
gttctcgagacgagcgatcgcttttaggacgcgaagtgcgtaattt

SEQ ID NO: 31350 - DNA, 41 bp, Emericella nidulans
gaattcactgcggccgccatggcggtctgggcgcagattta

SEQ ID NO: 31351 - DNA, 43 bp, Emericella nidulans
gttctcgagacgagcgatcgcccgaggatcgaccggtcaaagt

SEQ ID NO: 31352 - DNA, 49 bp, Emericella nidulans
gaattcactgcggccgccatgcgaaaccagaattagcctaagatgaaca

SEQ ID NO: 31353 - DNA, 42 bp, Emericella nidulans
gttctcgagacgagcgatcgcggagagctcgagctccgcaag

SEQ ID NO: 31354 - DNA, 48 bp, Emericella nidulans
gaattcactgcggccgccatgtgttatcttcgcgattgactcctctgc

SEQ ID NO: 31355 - DNA, 41 bp, Emericella nidulans
gttctcgagacgagcgatcgcgccgccacgacactcgacaa

SEQ ID NO: 31356 - DNA, 41 bp, Emericella nidulans
gaattcactgcggccgccatggctggaggcgggctcggata

SEQ ID NO: 31357 - DNA, 44 bp, Emericella nidulans
gttctcgagacgagcgatcgcccctgtgtcaagcgttcctggtc

SEQ ID NO: 31358 - DNA, 52 bp, Emericella nidulans
gaattcactgcggccgccatgttgtatctggctaactctgtcaaagctaaaa

SEQ ID NO: 31359 - DNA, 45 bp, Emericella nidulans
gttctcgagacgagcgatcgctcccactgaccaaatatccacagc

SEQ ID NO: 31360 - DNA, 46 bp, Emericella nidulans; identical to SEQ ID NO: 28382

SEQ ID NO: 31361 - DNA, 46 bp, Emericella nidulans; identical to SEQ ID NO: 28345

SEQ ID NO: 31362 - DNA, 42 bp, Emericella nidulans
gaattcactgcggccgccatgcggctgggaaatccagacctc

SEQ ID NO: 31363 - DNA, 52 bp, Emericella nidulans
gttctcgagacgagcgatcgccctaagcggactcttcatcttattttcctcc

SEQ ID NO: 31364 - DNA, 42 bp, Emericella nidulans
gaattcactgcggccgccatgggaaggcctccctcggcctaa

SEQ ID NO: 31365 - DNA, 43 bp, Emericella nidulans
gttctcgagacgagcgatcgcccttcgcaatgtcgaaggacca

SEQ ID NO: 31366 - DNA, 50 bp, Emericella nidulans
gaattcactgcggccgccatgctgaacttttctgacagtggtagggcttt

SEQ ID NO: 31367 - DNA, 39 bp, Emericella nidulans
gttctcgagacgagcgatcgcacacccggcgccgtcatc

SEQ ID NO: 31368 - DNA, 41 bp, Emericella nidulans
gaattcactgcggccgccatggccctgccgtaccgttgcat

SEQ ID NO: 31369 - DNA, 44 bp, Emericella nidulans
gttctcgagacgagcgatcgctccagcaaccttgccagcaattc

SEQ ID NO: 31370 - DNA, 42 bp, Emericella nidulans
gaattcactgcggccgccatgtcaacgtcgtcatcccgcaaa

SEQ ID NO: 31371 - DNA, 45 bp, Emericella nidulans
gttctcgagacgagcgatcgcccccaaaccatctttcgcatagaa

SEQ ID NO: 31372 - DNA, 41 bp, Emericella nidulans
gaattcactgcggccgccatgtgacgctcggtctgccttgg

SEQ ID NO: 31373 - DNA, 41 bp, Emericella nidulans
gttctcgagacgagcgatcgcccgacggggccggtaatagc

SEQ ID NO: 31374 - DNA, 41 bp, Emericella nidulans
gaattcactgcggccgccatggcggatctcgcacaggcaaa

SEQ ID NO: 31375 - DNA, 41 bp, Emericella nidulans
gttctcgagacgagcgatcgcctgcttctgcccgccgctta

SEQ ID NO: 31376 - DNA, 41 bp, Emericella nidulans
gaattcactgcggccgccatgcctctttgggttgcggttcg

SEQ ID NO: 31377 - DNA, 41 bp, Emericella nidulans
gttctcgagacgagcgatcgctctgcatcgctgccgtctcc

SEQ ID NO: 31378 - DNA, 41 bp, Emericella nidulans
gaattcactgcggccgccatgcggcggttccacatcccaag

SEQ ID NO: 31379 - DNA, 43 bp, Emericella nidulans
gttctcgagacgagcgatcgccactcctccacggaccggagtc

SEQ ID NO: 31380 - DNA, 41 bp, Emericella nidulans
gaattcactgcggccgccatgtcggtcggcctgattcttca

SEQ ID NO: 31381 - DNA, 44 bp, Emericella nidulans
gttctcgagacgagcgatcgcggaactcgagtccctctccaccc

SEQ ID NO: 31382 - DNA, 43 bp, Emericella nidulans
gaattcactgcggccgccatggcagaaaggttccacgcgcttc

SEQ ID NO: 31383 - DNA, 41 bp, Emericella nidulans
gttctcgagacgagcgatcgccggcgccaggatatgcgagt

SEQ ID NO: 31384 - DNA, 55 bp, Emericella nidulans
gaattcactgcggccgccatgagtattcttttgtacgtcttctttcctttcattc

SEQ ID NO: 31385 - DNA, 44 bp, Emericella nidulans
gttctcgagacgagcgatcgcttggacgaggaaaggcaacattc

SEQ ID NO: 31386 - DNA, 41 bp, Emericella nidulans
gaattcactgcggccgccatgtttttgccgcgcctgtcatt

SEQ ID NO: 31387 - DNA, 47 bp, Emericella nidulans
gttctcgagacgagcgatcgcgagggtaccgctgttagagatgacga

SEQ ID NO: 31388 - DNA, 44 bp, Emericella nidulans
gaattcactgcggccgccatggcaagcgatcgatcttgtcctga

SEQ ID NO: 31389 - DNA, 41 bp, Emericella nidulans
gttctcgagacgagcgatcgcccaacatccgcaagcgcaaa

SEQ ID NO: 31390 - DNA, 43 bp, Emericella nidulans
gaattcactgcggccgccatggcatcggatacgaagcctgcaa

SEQ ID NO: 31391 - DNA, 51 bp, Emericella nidulans
gttctcgagacgagcgatcgctggttccagtcaagcataagcatattcagc

SEQ ID NO: 31392 - DNA, 48 bp, Emericella nidulans
gaattcactgcggccgccatgcccactcagtatacaaaaggcttggtc

SEQ ID NO: 31393 - DNA, 44 bp, Emericella nidulans
gttctcgagacgagcgatcgcttttcgatcgccgcaatttgctt

SEQ ID NO: 31394 - DNA, 53 bp, Emericella nidulans
gaattcactgcggccgccatgcttcaaccactctatgaggtctactactttgg

SEQ ID NO: 31395 - DNA, 46 bp, Emericella nidulans
gttctcgagacgagcgatcgccccattgcttcatgagtgcatttcc

SEQ ID NO: 31396 - DNA, 53 bp, Emericella nidulans
gaattcactgcggccgccatgacatgagtttctaggtgagtctagagccgaat

SEQ ID NO: 31397 - DNA, 55 bp, Emericella nidulans
gttctcgagacgagcgatcgcgaataagcataccttgaagtgaagcgatatcagg

SEQ ID NO: 31398 - DNA, 47 bp, Emericella nidulans
gaattcactgcggccgccatgaacacctccctgctgaatatgcccac

SEQ ID NO: 31399 - DNA, 49 bp, Emericella nidulans
gttctcgagacgagcgatcgccgtagtatatttgaaccccttttgctga

SEQ ID NO: 31400 - DNA, 44 bp, Emericella nidulans
gaattcactgcggccgccatgcaccgtgcttctcgtccttctcg

SEQ ID NO: 31401 - DNA, 41 bp, Emericella nidulans
gttctcgagacgagcgatcgctggcgcttccaggtgtgtcg

SEQ ID NO: 31402 - DNA, 42 bp, Emericella nidulans
gaattcactgcggccgccatggaacgagtacgcccgcgctaa

SEQ ID NO: 31403 - DNA, 44 bp, Emericella nidulans
gttctcgagacgagcgatcgcgggggcactattccctgttgagg

SEQ ID NO: 31404 - DNA, 54 bp, Emericella nidulans; identical to SEQ ID NO: 28452

SEQ ID NO: 31405 - DNA, 42 bp, Emericella nidulans
gttctcgagacgagcgatcgcgctgctcctcagcagcgacca

SEQ ID NO: 31406 - DNA, 40 bp, Emericella nidulans
gaattcactgcggccgccatggctcaaccggctgggctcc

SEQ ID NO: 31407 - DNA, 41 bp, Emericella nidulans
gttctcgagacgagcgatcgctggcctgagcaagcgaaatc

SEQ ID NO: 31408 - DNA, 42 bp, Emericella nidulans
gaattcactgcggccgccatgccgcgcagttactcggtctgg

SEQ ID NO: 31409 - DNA, 41 bp, Emericella nidulans
gttctcgagacgagcgatcgcgcaaccgttgaatgcgcaaa

SEQ ID NO: 31410 - DNA, 44 bp, Emericella nidulans
gaattcactgcggccgccatggaacatcgacggagtcaacaccc

SEQ ID NO: 31411 - DNA, 47 bp, Emericella nidulans
gttctcgagacgagcgatcgcctagtgagcagccaacatcttcttga

SEQ ID NO: 31412 - DNA, 43 bp, Emericella nidulans
gaattcactgcggccgccatgtggacggtgttgcaggtcttcg

SEQ ID NO: 31413 - DNA, 42 bp, Emericella nidulans
gttctcgagacgagcgatcgctgcaacggtccgcttcccata

SEQ ID NO: 31414 - DNA, 43 bp, Emericella nidulans; identical to SEQ ID NO: 31412

SEQ ID NO: 31415 - DNA, 42 bp, Emericella nidulans; identical to SEQ ID NO: 31413

SEQ ID NO: 31416 - DNA, 50 bp, Emericella nidulans
gaattcactgcggccgccatgccctatctgataccatcactcgattctgc

SEQ ID NO: 31417 - DNA, 41 bp, Emericella nidulans
gttctcgagacgagcgatcgcgggcagcgcagccttaatca

SEQ ID NO: 31418 - DNA, 41 bp, Emericella nidulans
gaattcactgcggccgccatgtctggtgggcgctcagacat

SEQ ID NO: 31419 - DNA, 44 bp, Emericella nidulans
gttctcgagacgagcgatcgcccagtgtcccttgtatccgggtg

SEQ ID NO: 31420 - DNA, 41 bp, Emericella nidulans
gaattcactgcggccgccatggcatcgcccgcgaatacgac

SEQ ID NO: 31421 - DNA, 55 bp, Emericella nidulans
gttctcgagacgagcgatcgcgcttattggatctaaattatatgcgtatgtgaaa

SEQ ID NO: 31422 - DNA, 43 bp, Emericella nidulans
gaattcactgcggccgccatgtcacgactggtgacgcatctgg

SEQ ID NO: 31423 - DNA, 44 bp, Emericella nidulans
gttctcgagacgagcgatcgcggtgttggcaatgtcgacagcat

SEQ ID NO: 31424 - DNA, 42 bp, Emericella nidulans
gaattcactgcggccgccatgcgccggagagtgtccttgacg

SEQ ID NO: 31425 - DNA, 41 bp, Emericella nidulans
gttctcgagacgagcgatcgcttcccgggaaaccaccacca

SEQ ID NO: 31426 - DNA, 43 bp, Emericella nidulans
gaattcactgcggccgccatgtgctcctttcctggctttctgc

SEQ ID NO: 31427 - DNA, 53 bp, Emericella nidulans
gttctcgagacgagcgatcgcatctatttccatttcatcttctgtacgcttca

SEQ ID NO: 31428 - DNA, 47 bp, Emericella nidulans
gaattcactgcggccgccatgaaaccatatcctcttttcagggtgcc

SEQ ID NO: 31429 - DNA, 41 bp, Emericella nidulans
gttctcgagacgagcgatcgcttccccggcatcgtcatgtg

SEQ ID NO: 31430 - DNA, 47 bp, Emericella nidulans
gaattcactgcggccgccatggcgtttcgaacccaaagcatttatcc

SEQ ID NO: 31431 - DNA, 41 bp, Emericella nidulans; identical to SEQ ID NO: 28327

SEQ ID NO: 31432 - DNA, 41 bp, Emericella nidulans
gaattcactgcggccgccatgggccccgctggaaaagacct

SEQ ID NO: 31433 - DNA, 42 bp, Emericella nidulans
gttctcgagacgagcgatcgcccattcacgtgcggtggcttc

SEQ ID NO: 31434 - DNA, 43 bp, Emericella nidulans
gaattcactgcggccgccatgtcgctggctgctgtctctctgg

SEQ ID NO: 31435 - DNA, 41 bp, Emericella nidulans
gttctcgagacgagcgatcgcgccgacgtggttcccgttca

SEQ ID NO: 31436 - DNA, 41 bp, Emericella nidulans
gaattcactgcggccgccatgccgtcacggctttcgctgct

SEQ ID NO: 31437 - DNA, 44 bp, Emericella nidulans
gttctcgagacgagcgatcgctccctcaacagccacaatctggt

SEQ ID NO: 31438 - DNA, 41 bp, Emericella nidulans
gaattcactgcggccgccatgtcgcagcgatcgtcaacgtg

SEQ ID NO: 31439 - DNA, 53 bp, Emericella nidulans
gttctcgagacgagcgatcgcctcctttaacccacggtacttaagacccagaa

SEQ ID NO: 31440 - DNA, 42 bp, Emericella nidulans; identical to SEQ ID NO: 28406

SEQ ID NO: 31441 - DNA, 43 bp, Emericella nidulans
gttctcgagacgagcgatcgccgaccgaatttcctcgatggtc

SEQ ID NO: 31442 - DNA, 41 bp, Emericella nidulans
gaattcactgcggccgccatgcggtcgcaatggccctgaag

SEQ ID NO: 31443 - DNA, 41 bp, Emericella nidulans
gttctcgagacgagcgatcgccggctacgccaagctcacga

SEQ ID NO: 31444 - DNA, 41 bp, Emericella nidulans
gaattcactgcggccgccatggccaccagttccgcctgcac

SEQ ID NO: 31445 - DNA, 46 bp, Emericella nidulans
gttctcgagacgagcgatcgcgcggtacaagaattaagcgcgagga

SEQ ID NO: 31446 - DNA, 41 bp, Emericella nidulans
gaattcactgcggccgccatgcctcggcaccatcccaccat

SEQ ID NO: 31447 - DNA, 44 bp, Emericella nidulans
gttctcgagacgagcgatcgcggtccacatacagctaccgcaga

SEQ ID NO: 31448 - DNA, 42 bp, Emericella nidulans
gaattcactgcggccgccatgtggacgtccaggtcgttgaca

SEQ ID NO: 31449 - DNA, 46 bp, Emericella nidulans
gttctcgagacgagcgatcgctcgccatcaggggtcacccttatac

SEQ ID NO: 31450 - DNA, 53 bp, Emericella nidulans
gaattcactgcggccgccatgcaggtcgactctagaggatcccctgtgttagt

SEQ ID NO: 31451 - DNA, 49 bp, Emericella nidulans
gttctcgagacgagcgatcgcatcttccacagtctcattggctgtttca

SEQ ID NO: 31452 - DNA, 41 bp, Emericella nidulans
gaattcactgcggccgccatggggcaaggaagcgatggcac

SEQ ID NO: 31453 - DNA, 41 bp, Emericella nidulans
gttctcgagacgagcgatcgctgcctgggcaagctcgaaaa

SEQ ID NO: 31454 - DNA, 41 bp, Emericella nidulans
gaattcactgcggccgccatggacgaggccgacgacgaacc

SEQ ID NO: 31455 - DNA, 41 bp, Emericella nidulans
gttctcgagacgagcgatcgctcgccaattccgactgtgcc

SEQ ID NO: 31456 - DNA, 41 bp, Emericella nidulans
gaattcactgcggccgccatgcaccggtgccgcagggtaac

SEQ ID NO: 31457 - DNA, 57 bp, Emericella nidulans
gttctcgagacgagcgatcgccagatcgaagaaaggatagacatacttcaatggtgc

SEQ ID NO: 31458 - DNA, 54 bp, Emericella nidulans
gaattcactgcggccgccatggaatatatgaccaattcttgctatataggtgcc

SEQ ID NO: 31459 - DNA, 44 bp, Emericella nidulans
gttctcgagacgagcgatcgcggcttgaatgcctcgtgcacatc

SEQ ID NO: 31460 - DNA, 44 bp, Emericella nidulans
gaattcactgcggccgccatgccactaaggccatcctcgtcgtc

SEQ ID NO: 31461 - DNA, 42 bp, Emericella nidulans
gttctcgagacgagcgatcgctccttccgcacctgctcatcc

SEQ ID NO: 31462 - DNA, 45 bp, Emericella nidulans
gaattcactgcggccgccatgtaatcgaaaatgcgaacgtcacca

SEQ ID NO: 31463 - DNA, 48 bp, Emericella nidulans
gttctcgagacgagcgatcgctcgcttttccagttctctatccaggaa

SEQ ID NO: 31464 - DNA, 42 bp, Emericella nidulans
gaattcactgcggccgccatgcgtgttgcgccacagttacgg

SEQ ID NO: 31465 - DNA, 39 bp, Emericella nidulans
gttctcgagacgagcgatcgcggatgcgcaccccctccc

SEQ ID NO: 31466 - DNA, 40 bp, Emericella nidulans
gaattcactgcggccgccatggctccaggcgccggtcttc

SEQ ID NO: 31467 - DNA, 41 bp, Emericella nidulans
gttctcgagacgagcgatcgccctgctcgtgcaaaggtggc

SEQ ID NO: 31468 - DNA, 44 bp, Emericella nidulans
gaattcactgcggccgccatgtgggccacaaggagttccatacg

SEQ ID NO: 31469 - DNA, 41 bp, Emericella nidulans
gttctcgagacgagcgatcgctgtggcagccagccaaacaa

SEQ ID NO: 31470 - DNA, 42 bp, Emericella nidulans
gaattcactgcggccgccatgggggctacaacagcggcttgc

SEQ ID NO: 31471 - DNA, 41 bp, Emericella nidulans
gttctcgagacgagcgatcgcgccgctggttgatgggcatt

SEQ ID NO: 31472 - DNA, 54 bp, Emericella nidulans
gaattcactgcggccgccatgaccaactgatcatgtaaacagttctccggctta

SEQ ID NO: 31473 - DNA, 44 bp, Emericella nidulans
gttctcgagacgagcgatcgccccttgctccaactcctcgctct

SEQ ID NO: 31474 - DNA, 42 bp, Emericella nidulans
gaattcactgcggccgccatgccgcacttgtgcctggaaacc

SEQ ID NO: 31475 - DNA, 41 bp, Emericella nidulans
gttctcgagacgagcgatcgcttggctgtcgtcgccaaacg

SEQ ID NO: 31476 - DNA, 41 bp, Emericella nidulans
gaattcactgcggccgccatgaggcggagcgcgagaggcta

SEQ ID NO: 31477 - DNA, 43 bp, Emericella nidulans
gttctcgagacgagcgatcgctcacgagcagcatcgtccaggt

SEQ ID NO: 31478 - DNA, 45 bp, Emericella nidulans
gaattcactgcggccgccatggcccacgctattctacttcgagcc

SEQ ID NO: 31479 - DNA, 42 bp, Emericella nidulans
gttctcgagacgagcgatcgcggtgaggagccctggccgata

SEQ ID NO: 31480 - DNA, 42 bp, Emericella nidulans
gaattcactgcggccgccatgtccccggccgagaagttagca

SEQ ID NO: 31481 - DNA, 43 bp, Emericella nidulans
gttctcgagacgagcgatcgccgacaatatcagcccccgtcgt

SEQ ID NO: 31482 - DNA, 41 bp, Emericella nidulans
gaattcactgcggccgccatgaccggagaccgcgacattgc

SEQ ID NO: 31483 - DNA, 57 bp, Emericella nidulans
gttctcgagacgagcgatcgcagtaactatctgtctattgtagcatgactaagcaca

SEQ ID NO: 31484 - DNA, 41 bp, Emericella nidulans
gaattcactgcggccgccatgcggctccgacgaagcggtag

SEQ ID NO: 31485 - DNA, 47 bp, Emericella nidulans
gttctcgagacgagcgatcgccaacgtctgtccaactgacgctgtta

SEQ ID NO: 31486 - DNA, 44 bp, Emericella nidulans
gaattcactgcggccgccatgaaatctgccaacgcaatgaagaa

SEQ ID NO: 31487 - DNA, 46 bp, Emericella nidulans
gttctcgagacgagcgatcgcgtagctccgatgacggagttgttcg

SEQ ID NO: 31488 - DNA, 49 bp, Emericella nidulans
gaattcactgcggccgccatgtcactctcatgaagtcattgctgccttt

SEQ ID NO: 31489 - DNA, 44 bp, Emericella nidulans
gttctcgagacgagcgatcgcgccagcggaccaagtctgtctga

SEQ ID NO: 31490 - DNA, 41 bp, Emericella nidulans
gaattcactgcggccgccatggtgaactgcgccccgatcct

SEQ ID NO: 31491 - DNA, 41 bp, Emericella nidulans
gttctcgagacgagcgatcgcgaggtccgcgtggaggaggt

SEQ ID NO: 31492 - DNA, 45 bp, Emericella nidulans
gaattcactgcggccgccatgcatcaaatgcaccactccagtcca

SEQ ID NO: 31493 - DNA, 41 bp, Emericella nidulans
gttctcgagacgagcgatcgccaggaaagcggctgccagga

SEQ ID NO: 31494 - DNA, 49 bp, Emericella nidulans
gaattcactgcggccgccatgtgcattctgagactttggatcctgaaca

SEQ ID NO: 31495 - DNA, 41 bp, Emericella nidulans
gttctcgagacgagcgatcgccaggatgggcgggaaagcaa

SEQ ID NO: 31496 - DNA, 41 bp, Emericella nidulans
gaattcactgcggccgccatggcatctccgcccccatccta

SEQ ID NO: 31497 - DNA, 47 bp, Emericella nidulans
gttctcgagacgagcgatcgcccccctcatcttcctgaagaagtcca

SEQ ID NO: 31498 - DNA, 45 bp, Emericella nidulans
gaattcactgcggccgccatgagaaaagagcagactccgtgtggg

SEQ ID NO: 31499 - DNA, 44 bp, Emericella nidulans
gttctcgagacgagcgatcgctgcagctgctaccaatgtcatca

SEQ ID NO: 31500 - DNA, 41 bp, Emericella nidulans
gaattcactgcggccgccatgtggggtttctcggcgaatgg

SEQ ID NO: 31501 - DNA, 41 bp, Emericella nidulans
gttctcgagacgagcgatcgctgccatgccgcatctcctca

SEQ ID NO: 31502 - DNA, 48 bp, Emericella nidulans
gaattcactgcggccgccatgcggctcaggtttatatcaagcgatact

SEQ ID NO: 31503 - DNA, 53 bp, Emericella nidulans
gttctcgagacgagcgatcgcagttcttctcactatattgttcccagacttcg

SEQ ID NO: 31504 - DNA, 41 bp, Emericella nidulans
gaattcactgcggccgccatgcttcgccgcctcctacagca

SEQ ID NO: 31505 - DNA, 41 bp, Emericella nidulans
gttctcgagacgagcgatcgcgcggaagatccggcaagaca

SEQ ID NO: 31506 - DNA, 49 bp, Emericella nidulans
gaattcactgcggccgccatggatttcagtatcactcagttccaccaca

SEQ ID NO: 31507 - DNA, 44 bp, Emericella nidulans
gttctcgagacgagcgatcgccgcactttccggtaactcggtgg

SEQ ID NO: 31508 - DNA, 41 bp, Emericella nidulans
gaattcactgcggccgccatggcgctcgggcgacaaactct

SEQ ID NO: 31509 - DNA, 41 bp, Emericella nidulans
gttctcgagacgagcgatcgcgttccagcgctgtggcttcg

SEQ ID NO: 31510 - DNA, 44 bp, Emericella nidulans
gaattcactgcggccgccatgcattcccgttctgccgcatattg

SEQ ID NO: 31511 - DNA, 50 bp, Emericella nidulans
gttctcgagacgagcgatcgccaagagatcaacatacctcgcttgctctg

SEQ ID NO: 31512 - DNA, 57 bp, Emericella nidulans
gaattcactgcggccgccatgatcatattcgatttttataaagacactacagcccac

SEQ ID NO: 31513 - DNA, 41 bp, Emericella nidulans
gttctcgagacgagcgatcgccttcaccggcgcaatgtccc

SEQ ID NO: 31514 - DNA, 45 bp, Emericella nidulans
gaattcactgcggccgccatggctctgcactgaacgagaaacaca

SEQ ID NO: 31515 - DNA, 41 bp, Emericella nidulans
gttctcgagacgagcgatcgctgccgcgtatctcggagctg

SEQ ID NO: 31516 - DNA, 41 bp, Emericella nidulans
gaattcactgcggccgccatgcgtctggggccttggtccac

SEQ ID NO: 31517 - DNA, 45 bp, Emericella nidulans
gttctcgagacgagcgatcgctccagtgaacgtgcttgtctgctg

SEQ ID NO: 31518 - DNA, 42 bp, Emericella nidulans
gaattcactgcggccgccatgtcgaccctttcgtgggtccag

SEQ ID NO: 31519 - DNA, 41 bp, Emericella nidulans
gttctcgagacgagcgatcgccgctgacgaccaagcccgta

SEQ ID NO: 31520 - DNA, 43 bp, Emericella nidulans
gaattcactgcggccgccatggcctgctcaagtggacgcgaac

SEQ ID NO: 31521 - DNA, 41 bp, Emericella nidulans
gttctcgagacgagcgatcgcgggggtttgtggctgcaacg

SEQ ID NO: 31522 - DNA, 42 bp, Emericella nidulans
gaattcactgcggccgccatgcaagggtcaggcgcgtgtcat

SEQ ID NO: 31523 - DNA, 41 bp, Emericella nidulans
gttctcgagacgagcgatcgctgcagggtcgctcacagcaa

SEQ ID NO: 31524 - DNA, 42 bp, Emericella nidulans
gaattcactgcggccgccatgcctgaccgacctccgctacgc

SEQ ID NO: 31525 - DNA, 44 bp, Emericella nidulans
gttctcgagacgagcgatcgctctgcacttcgagtccgtgatgc

SEQ ID NO: 31526 - DNA, 41 bp, Emericella nidulans
gaattcactgcggccgccatgcgtcggagcggtgcagacaa

SEQ ID NO: 31527 - DNA, 45 bp, Emericella nidulans
gttctcgagacgagcgatcgcgctccagtcgtagctcacggcata

SEQ ID NO: 31528 - DNA, 41 bp, Emericella nidulans
gaattcactgcggccgccatgggctgccgccaagccctact

SEQ ID NO: 31529 - DNA, 49 bp, Emericella nidulans
gttctcgagacgagcgatcgcatttcaataccatactcctccttgaggg

SEQ ID NO: 31530 - DNA, 44 bp, Emericella nidulans
gaattcactgcggccgccatggggaggtgacgccatcactctga

SEQ ID NO: 31531 - DNA, 42 bp, Emericella nidulans
gttctcgagacgagcgatcgctaggagtcggcggatgcgatg

SEQ ID NO: 31532 - DNA, 44 bp, Emericella nidulans
gaattcactgcggccgccatgtccttcattggtgccggactctc

SEQ ID NO: 31533 - DNA, 41 bp, Emericella nidulans
gttctcgagacgagcgatcgccctccggtcttcgcccttgc

SEQ ID NO: 31534 - DNA, 43 bp, Emericella nidulans
gaattcactgcggccgccatgtcgtcgcattacaccaaaccca

SEQ ID NO: 31535 - DNA, 42 bp, Emericella nidulans
gttctcgagacgagcgatcgcgcatcgcgtctcgttgtacgc

SEQ ID NO: 31536 - DNA, 41 bp, Emericella nidulans
gaattcactgcggccgccatgttgcttctcggccgccttac

SEQ ID NO: 31537 - DNA, 41 bp, Emericella nidulans
gttctcgagacgagcgatcgccgtccccaaatcccggagaa

SEQ ID NO: 31538 - DNA, 41 bp, Emericella nidulans
gaattcactgcggccgccatggcgatggccggaaaaatgac

SEQ ID NO: 31539 - DNA, 41 bp, Emericella nidulans
gttctcgagacgagcgatcgccggggccagagtcacgcatc

SEQ ID NO: 31540 - DNA, 51 bp, Emericella nidulans
gaattcactgcggccgccatgtatccctcccactacctacagatggtcagc

SEQ ID NO: 31541 - DNA, 41 bp, Emericella nidulans
gttctcgagacgagcgatcgcgccctcccgatcctgcacct

SEQ ID NO: 31542 - DNA, 41 bp, Emericella nidulans
gaattcactgcggccgccatgggatcggcccacgaaggacc

SEQ ID NO: 31543 - DNA, 42 bp, Emericella nidulans
gttctcgagacgagcgatcgcccgcagcaggtctccaaggtg

SEQ ID NO: 31544 - DNA, 47 bp, Emericella nidulans
gaattcactgcggccgccatgtgcaagcatctacatcgcttggtaca

SEQ ID NO: 31545 - DNA, 57 bp, Emericella nidulans
gttctcgagacgagcgatcgctgttcagctatactttttgttcagaaaatgcgaccc

SEQ ID NO: 31546 - DNA, 41 bp, Emericella nidulans
gaattcactgcggccgccatgggctcaggccgtaccgggag

SEQ ID NO: 31547 - DNA, 41 bp, Emericella nidulans
gttctcgagacgagcgatcgcctgcgccctgtgcaccaagt

SEQ ID NO: 31548 - DNA, 42 bp, Emericella nidulans
gaattcactgcggccgccatgcgccccaatcgcaattaccca

SEQ ID NO: 31549 - DNA, 41 bp, Emericella nidulans
gttctcgagacgagcgatcgccaccacccccaggcgtcatt

SEQ ID NO: 31550 - DNA, 41 bp, Emericella nidulans
gaattcactgcggccgccatgccgagccccacgagatcgaa

SEQ ID NO: 31551 - DNA, 41 bp, Emericella nidulans
gttctcgagacgagcgatcgctcagcacatcgtgcccatgc

SEQ ID NO: 31552 - DNA, 41 bp, Emericella nidulans
gaattcactgcggccgccatgcctgccgcgtacaccggaac

SEQ ID NO: 31553 - DNA, 41 bp, Emericella nidulans
gttctcgagacgagcgatcgcgcctggaaagcggcatcgaa

SEQ ID NO: 31554 - DNA, 41 bp, Emericella nidulans
gaattcactgcggccgccatgttgtcctcgcgcagcacgtt

SEQ ID NO: 31555 - DNA, 47 bp, Emericella nidulans
gttctcgagacgagcgatcgcgccagaaacgttaatgcccctaaagc

SEQ ID NO: 31556 - DNA, 45 bp, Emericella nidulans
gaattcactgcggccgccatgccacatccaacaacatcccctgct

SEQ ID NO: 31557 - DNA, 41 bp, Emericella nidulans
gttctcgagacgagcgatcgccatgcgaagtccgcgtccag

SEQ ID NO: 31558 - DNA, 42 bp, Emericella nidulans
gaattcactgcggccgccatgtggccatcacttgctgacagg

SEQ ID NO: 31559 - DNA, 41 bp, Emericella nidulans
gttctcgagacgagcgatcgcctgagccgtgcgaggcgtta

SEQ ID NO: 31560 - DNA, 45 bp, Emericella nidulans
gaattcactgcggccgccatgcatgcttaacgaagtggtggatcg

SEQ ID NO: 31561 - DNA, 42 bp, Emericella nidulans
gttctcgagacgagcgatcgctcaaaatgccatggcggagga

SEQ ID NO: 31562 - DNA, 49 bp, Emericella nidulans
gaattcactgcggccgccatggcagcgatggtaagatcaattcttttcc

SEQ ID NO: 31563 - DNA, 41 bp, Emericella nidulans
gttctcgagacgagcgatcgcatgcgccggtgggggtattt

SEQ ID NO: 31564 - DNA, 57 bp, Emericella nidulans
gaattcactgcggccgccatggtatcccgagatcttcaagagatgtagggagtcgta

SEQ ID NO: 31565 - DNA, 43 bp, Emericella nidulans
gttctcgagacgagcgatcgccaagcatgcacgtgctctgtcc

SEQ ID NO: 31566 - DNA, 42 bp, Emericella nidulans
gaattcactgcggccgccatgcaatcatccagccgtcggtca

SEQ ID NO: 31567 - DNA, 43 bp, Emericella nidulans
gttctcgagacgagcgatcgctcaacaatccacatcgccaacc

SEQ ID NO: 31568 - DNA, 41 bp, Emericella nidulans
gaattcactgcggccgccatgaggcttcgccaacgctctca

SEQ ID NO: 31569 - DNA, 46 bp, Emericella nidulans
gttctcgagacgagcgatcgcccagtcactgatgtgcaccctatcc

SEQ ID NO: 31570 - DNA, 42 bp, Emericella nidulans
gaattcactgcggccgccatggggagctcatcctccgcatgg

SEQ ID NO: 31571 - DNA, 42 bp, Emericella nidulans
gttctcgagacgagcgatcgctgcacgccttatccccaaccc

SEQ ID NO: 31572 - DNA, 41 bp, Emericella nidulans
gaattcactgcggccgccatgcggcgttgacccgtccagat

SEQ ID NO: 31573 - DNA, 43 bp, Emericella nidulans
gttctcgagacgagcgatcgccgcatagggtggccagaagctg

SEQ ID NO: 31574 - DNA, 48 bp, Emericella nidulans
gaattcactgcggccgccatgtcagacgataagactatccggttgtgg

SEQ ID NO: 31575 - DNA, 42 bp, Emericella nidulans
gttctcgagacgagcgatcgctcccagaccctcaccgttcca

SEQ ID NO: 31576 - DNA, 43 bp, Emericella nidulans
gaattcactgcggccgccatgtgcgggcttcctctacgactgg

SEQ ID NO: 31577 - DNA, 53 bp, Emericella nidulans
gttctcgagacgagcgatcgcgatatacttgacaccattcgcttcaatcttgg

SEQ ID NO: 31578 - DNA, 41 bp, Emericella nidulans
gaattcactgcggccgccatgtgagcgcgcaagcttcacaa

SEQ ID NO: 31579 - DNA, 48 bp, Emericella nidulans
gttctcgagacgagcgatcgccctcctgacatgacaacatactgcaca

SEQ ID NO: 31580 - DNA, 44 bp, Emericella nidulans
gaattcactgcggccgccatgtcgccttcaaccagactgagacg

SEQ ID NO: 31581 - DNA, 43 bp, Emericella nidulans
gttctcgagacgagcgatcgccgctctgtctagcgcgcaaagt

SEQ ID NO: 31582 - DNA, 41 bp, Emericella nidulans
gaattcactgcggccgccatgtcggcttggagccagccttg

SEQ ID NO: 31583 - DNA, 43 bp, Emericella nidulans
gttctcgagacgagcgatcgcccacgcatacgagacgggaaca

SEQ ID NO: 31584 - DNA, 57 bp, Emericella nidulans
gaattcactgcggccgccatgaacgaaacactctttttagagtctaccacgcgcatc

SEQ ID NO: 31585 - DNA, 46 bp, Emericella nidulans; identical to SEQ ID NO: 28365

SEQ ID NO: 31586 - DNA, 47 bp, Emericella nidulans
gaattcactgcggccgccatgtactcctacctccccttctagcctcc

SEQ ID NO: 31587 - DNA, 41 bp, Emericella nidulans
gttctcgagacgagcgatcgcagcctcgcccgagcagattg

SEQ ID NO: 31588 - DNA, 44 bp, Emericella nidulans
gaattcactgcggccgccatggcgcaggtgagcttgatttccct

SEQ ID NO: 31589 - DNA, 43 bp, Emericella nidulans
gttctcgagacgagcgatcgcgcccatcaacagagtcgccctc

SEQ ID NO: 31590 - DNA, 56 bp, Emericella nidulans
gaattcactgcggccgccatgtatgatgtgagtcctaggcctcttacagtcaaaat

SEQ ID NO: 31591 - DNA, 46 bp, Emericella nidulans
gttctcgagacgagcgatcgcgttctcggtgtcttgggtcttctca

SEQ ID NO: 31592 - DNA, 48 bp, Emericella nidulans
gaattcactgcggccgccatggaacggagactgacgttagttgggtaa

SEQ ID NO: 31593 - DNA, 41 bp, Emericella nidulans
gttctcgagacgagcgatcgccggaatcggcaacccgttca

SEQ ID NO: 31594 - DNA, 41 bp, Emericella nidulans
gaattcactgcggccgccatgaaggtttggccgggagcttt

SEQ ID NO: 31595 - DNA, 54 bp, Emericella nidulans
gttctcgagacgagcgatcgcactcatatcctataatctctattctggcttgga

SEQ ID NO: 31596 - DNA, 41 bp, Emericella nidulans
gaattcactgcggccgccatgccaagcgcctgccgtctcat

SEQ ID NO: 31597 - DNA, 52 bp, Emericella nidulans
gttctcgagacgagcgatcgcttccacggatttctctctattctcaacctca

SEQ ID NO: 31598 - DNA, 41 bp, Emericella nidulans
gaattcactgcggccgccatgacaagccgaagcccgagtgc

SEQ ID NO: 31599 - DNA, 41 bp, Emericella nidulans
gttctcgagacgagcgatcgcacgatccccgctcccgaaaa

SEQ ID NO: 31600 - DNA, 41 bp, Emericella nidulans
gaattcactgcggccgccatggtgacctggttgcccgtgcc

SEQ ID NO: 31601 - DNA, 57 bp, Emericella nidulans
gttctcgagacgagcgatcgcagtagtatgcacctcaatcccactcttaagaaagaa

SEQ ID NO: 31602 - DNA, 41 bp, Emericella nidulans
gaattcactgcggccgccatgagcaagggcgatgccaaacc

SEQ ID NO: 31603 - DNA, 54 bp, Emericella nidulans
gttctcgagacgagcgatcgctctttacatctgattgaagtacttctcccaccc

SEQ ID NO: 31604 - DNA, 41 bp, Emericella nidulans
gaattcactgcggccgccatgttgctcgacgtggtgcagga

SEQ ID NO: 31605 - DNA, 47 bp, Emericella nidulans
gttctcgagacgagcgatcgctggaatcaacgcatactcaatctccc

SEQ ID NO: 31606 - DNA, 41 bp, Emericella nidulans
gaattcactgcggccgccatgggggattgcggtcgtcgtgt

SEQ ID NO: 31607 - DNA, 41 bp, Emericella nidulans
gttctcgagacgagcgatcgcgcagctttggctcgcggaac

SEQ ID NO: 31608 - DNA, 42 bp, Emericella nidulans
gaattcactgcggccgccatgtgtgcatgtcggctgggatca

SEQ ID NO: 31609 - DNA, 41 bp, Emericella nidulans
gttctcgagacgagcgatcgcccgggatccgcaattgaagc

SEQ ID NO: 31610 - DNA, 42 bp, Emericella nidulans
gaattcactgcggccgccatggcggttgttgatcggcagggt

SEQ ID NO: 31611 - DNA, 44 bp, Emericella nidulans
gttctcgagacgagcgatcgcgcatctccgtccctgctgacttg

SEQ ID NO: 31612 - DNA, 41 bp, Emericella nidulans
gaattcactgcggccgccatggctcttcgcgctgcttgggt

SEQ ID NO: 31613 - DNA, 40 bp, Emericella nidulans
gttctcgagacgagcgatcgccgcgctggacccagctgat

SEQ ID NO: 31614 - DNA, 41 bp, Emericella nidulans
gaattcactgcggccgccatgccggtaccccattgccgcta

SEQ ID NO: 31615 - DNA, 41 bp, Emericella nidulans
gttctcgagacgagcgatcgcctgcggcagagcgaggttga

SEQ ID NO: 31616 - DNA, 53 bp, Emericella nidulans
gaattcactgcggccgccatgactacacctgttgcttcttgacttcattctgg

SEQ ID NO: 31617 - DNA, 40 bp, Emericella nidulans
gttctcgagacgagcgatcgcggccggctgccgctagtgt

SEQ ID NO: 31618 - DNA, 42 bp, Emericella nidulans
gaattcactgcggccgccatgccgtcatcaacgacggcttcc

SEQ ID NO: 31619 - DNA, 45 bp, Emericella nidulans
gttctcgagacgagcgatcgccgtcaacagcaaggctctcagggt

SEQ ID NO: 31620 - DNA, 41 bp, Emericella nidulans
gaattcactgcggccgccatgcgccgccctccaaagtctca

SEQ ID NO: 31621 - DNA, 45 bp, Emericella nidulans
gttctcgagacgagcgatcgctccaaggcttgcatttcttgacga

SEQ ID NO: 31622 - DNA, 46 bp, Emericella nidulans
gaattcactgcggccgccatgcccaacaaagtcccattcctctaca

SEQ ID NO: 31623 - DNA, 41 bp, Emericella nidulans
gttctcgagacgagcgatcgctgttgagggcgttggcgaaa

SEQ ID NO: 31624 - DNA, 43 bp, Emericella nidulans
gaattcactgcggccgccatgcccatccgcagcacatctaggc

SEQ ID NO: 31625 - DNA, 41 bp, Emericella nidulans
gttctcgagacgagcgatcgccatgttgccctccgggtgct

SEQ ID NO: 31626 - DNA, 41 bp, Emericella nidulans
gaattcactgcggccgccatgtccttgcccgcttccgatcc

SEQ ID NO: 31627 - DNA, 43 bp, Emericella nidulans
gttctcgagacgagcgatcgcgcaggcgactgtttccccttcc

SEQ ID NO: 31628 - DNA, 44 bp, Emericella nidulans
gaattcactgcggccgccatgtcccaaccggaagagactggagc

SEQ ID NO: 31629 - DNA, 41 bp, Emericella nidulans
gttctcgagacgagcgatcgcccacgtttgccggcgaccta

SEQ ID NO: 31630 - DNA, 41 bp, Emericella nidulans
gaattcactgcggccgccatggcccaaatccgcgacaagga

SEQ ID NO: 31631 - DNA, 53 bp, Emericella nidulans
gttctcgagacgagcgatcgcttcaatgacagttgcccatattttacagttca

SEQ ID NO: 31632 - DNA, 41 bp, Emericella nidulans
gaattcactgcggccgccatgtggtggccttgctgcccttt

SEQ ID NO: 31633 - DNA, 42 bp, Emericella nidulans
gttctcgagacgagcgatcgcccattgtcgaggggtcagcct

SEQ ID NO: 31634 - DNA, 45 bp, Emericella nidulans
gaattcactgcggccgccatggcagttgttcatcgggtctgaggg

SEQ ID NO: 31635 - DNA, 41 bp, Emericella nidulans
gttctcgagacgagcgatcgctgggagcactcaccggatca

SEQ ID NO: 31636 - DNA, 50 bp, Emericella nidulans
gaattcactgcggccgccatggtattcggtcgatattgctaaagcgctca

SEQ ID NO: 31637 - DNA, 41 bp, Emericella nidulans
gttctcgagacgagcgatcgccggcaatcgtgccctccttc

SEQ ID NO: 31638 - DNA, 51 bp, Emericella nidulans
gaattcactgcggccgccatgattgcgaactatgggattatcgaaagtcag

SEQ ID NO: 31639 - DNA, 52 bp, Emericella nidulans
gttctcgagacgagcgatcgcgtatttggccctaggcacataagataattgg

SEQ ID NO: 31640 - DNA, 51 bp, Emericella nidulans; identical to SEQ ID NO: 31638

SEQ ID NO: 31641 - DNA, 52 bp, Emericella nidulans; identical to SEQ ID NO: 31639

SEQ ID NO: 31642 - DNA, 53 bp, Emericella nidulans
gaattcactgcggccgccatggcgttcagatgtattctggactctatctctgg

SEQ ID NO: 31643 - DNA, 54 bp, Emericella nidulans
gttctcgagacgagcgatcgctgatatatgtacagtttacctcttccgcgctct

SEQ ID NO: 31644 - DNA, 44 bp, Emericella nidulans
gaattcactgcggccgccatgcaagcttcccgatcctgcctaca

SEQ ID NO: 31645 - DNA, 45 bp, Emericella nidulans
gttctcgagacgagcgatcgctcggggaactcgtcttcgagcttt

SEQ ID NO: 31646 - DNA, 51 bp, Emericella nidulans
gaattcactgcggccgccatgattacaccatggggtctacgcaatatctca

SEQ ID NO: 31647 - DNA, 52 bp, Emericella nidulans
gttctcgagacgagcgatcgccgttaaagttcataacgacacccaaaaatcg

SEQ ID NO: 31648 - DNA, 40 bp, Emericella nidulans
gaattcactgcggccgccatgcggatgcgccgatgctgac

SEQ ID NO: 31649 - DNA, 57 bp, Emericella nidulans
gttctcgagacgagcgatcgctctatctatatagaaatgtctgaccataaggacctg

SEQ ID NO: 31650 - DNA, 41 bp, Emericella nidulans
gaattcactgcggccgccatgccaccaggaggccgttcacc

SEQ ID NO: 31651 - DNA, 44 bp, Emericella nidulans
gttctcgagacgagcgatcgcggtgtcccgcaacattacccaca

SEQ ID NO: 31652 - DNA, 41 bp, Emericella nidulans
gaattcactgcggccgccatgtaccatcccgaccggccaga

SEQ ID NO: 31653 - DNA, 41 bp, Emericella nidulans
gttctcgagacgagcgatcgcaacccggagcgcatcaccaa

SEQ ID NO: 31654 - DNA, 43 bp, Emericella nidulans
gaattcactgcggccgccatgccccaaaccgacctcactctcc

SEQ ID NO: 31655 - DNA, 41 bp, Emericella nidulans
gttctcgagacgagcgatcgctgcccattcggcaaagacca

SEQ ID NO: 31656 - DNA, 41 bp, Emericella nidulans
gaattcactgcggccgccatgtgggttctggcaccgcaagc

SEQ ID NO: 31657 - DNA, 42 bp, Emericella nidulans
gttctcgagacgagcgatcgctgccatcgcccactcagtacg

SEQ ID NO: 31658 - DNA, 41 bp, Emericella nidulans
gaattcactgcggccgccatgcccgagcttccgcttcaccc

SEQ ID NO: 31659 - DNA, 41 bp, Emericella nidulans
gttctcgagacgagcgatcgcagccgcccaagtgatccaat

SEQ ID NO: 31660 - DNA, 45 bp, Emericella nidulans
gaattcactgcggccgccatgtgggaggacctctcgtccattctg

SEQ ID NO: 31661 - DNA, 47 bp, Emericella nidulans
gttctcgagacgagcgatcgcagagccaggttcagactcagcacgtc

SEQ ID NO: 31662 - DNA, 42 bp, Emericella nidulans
gaattcactgcggccgccatgcggagcaggcacaatatgcag

SEQ ID NO: 31663 - DNA, 44 bp, Emericella nidulans
gttctcgagacgagcgatcgctcagcgatatcacgaacggagcc

SEQ ID NO: 31664 - DNA, 41 bp, Emericella nidulans
gaattcactgcggccgccatgctgctgctgcaggcgacgac

SEQ ID NO: 31665 - DNA, 41 bp, Emericella nidulans
gttctcgagacgagcgatcgctgcttcccgtgggtgccaat

SEQ ID NO: 31666 - DNA, 44 bp, Emericella nidulans
gaattcactgcggccgccatgggatggggacagcggattatgga

SEQ ID NO: 31667 - DNA, 41 bp, Emericella nidulans
gttctcgagacgagcgatcgcgcccgccttcaatcccctca

SEQ ID NO: 31668 - DNA, 47 bp, Emericella nidulans
gaattcactgcggccgccatgactctttgctcagtatgacgcccatt

SEQ ID NO: 31669 - DNA, 41 bp, Emericella nidulans
gttctcgagacgagcgatcgcggttcggggtacgtggtggg

SEQ ID NO: 31670 - DNA, 42 bp, Emericella nidulans
gaattcactgcggccgccatgtgcgttcaatccctggcaacg

SEQ ID NO: 31671 - DNA, 42 bp, Emericella nidulans
gttctcgagacgagcgatcgctcatcggcctgattcgactgc

SEQ ID NO: 31672 - DNA, 45 bp, Emericella nidulans
gaattcactgcggccgccatgtgttgactttcgctttcaccagca

SEQ ID NO: 31673 - DNA, 44 bp, Emericella nidulans
gttctcgagacgagcgatcgcgacccatcaactcagcaacagca

SEQ ID NO: 31674 - DNA, 44 bp, Emericella nidulans
gaattcactgcggccgccatgcaatggcacaaagcacaaacaaa

SEQ ID NO: 31675 - DNA, 45 bp, Emericella nidulans
gttctcgagacgagcgatcgcggatgttcgtggacatgagcgtga

SEQ ID NO: 31676 - DNA, 41 bp, Emericella nidulans
gaattcactgcggccgccatgcagcccgaagcgcaccaaaa

SEQ ID NO: 31677 - DNA, 52 bp, Emericella nidulans
gttctcgagacgagcgatcgcccatatagcttctgtttggatctggagttga

SEQ ID NO: 31678 - DNA, 46 bp, Emericella nidulans
gaattcactgcggccgccatgcgcatggaatacggacagaaaccgt

SEQ ID NO: 31679 - DNA, 41 bp, Emericella nidulans
gttctcgagacgagcgatcgcccagccgcctcctgctcatc

SEQ ID NO: 31680 - DNA, 52 bp, Emericella nidulans
gaattcactgcggccgccatgcagtgttaacttctggcaggatacttcttgg

SEQ ID NO: 31681 - DNA, 44 bp, Emericella nidulans
gttctcgagacgagcgatcgcttttggattccgcgacgcaaatg

SEQ ID NO: 31682 - DNA, 41 bp, Emericella nidulans
gaattcactgcggccgccatgtgccacctcgtcagcgtcgt

SEQ ID NO: 31683 - DNA, 49 bp, Emericella nidulans
gttctcgagacgagcgatcgcgcaaactacaagcacatgaaagatctga

SEQ ID NO: 31684 - DNA, 42 bp, Emericella nidulans
gaattcactgcggccgccatgcccgctcaactcccacggatt

SEQ ID NO: 31685 - DNA, 43 bp, Emericella nidulans
gttctcgagacgagcgatcgccccaaaccacccagttgtaccc

SEQ ID NO: 31686 - DNA, 43 bp, Emericella nidulans
gaattcactgcggccgccatgtcgcggagaaagatgaggacga

SEQ ID NO: 31687 - DNA, 46 bp, Emericella nidulans
gttctcgagacgagcgatcgcagaaaaatggcataccctgaagtgc

SEQ ID NO: 31688 - DNA, 41 bp, Emericella nidulans
gaattcactgcggccgccatgccaccgcagctctcccctga

SEQ ID NO: 31689 - DNA, 41 bp, Emericella nidulans
gttctcgagacgagcgatcgccgcatgacagccctcccctc

SEQ ID NO: 31690 - DNA, 41 bp, Emericella nidulans
gaattcactgcggccgccatggcaggagaacgcagcgagcc

SEQ ID NO: 31691 - DNA, 41 bp, Emericella nidulans
gttctcgagacgagcgatcgcgcggcaccgcaacctctttc

SEQ ID NO: 31692 - DNA, 46 bp, Emericella nidulans
gaattcactgcggccgccatggccttgtttagtgcctggtccgatt

SEQ ID NO: 31693 - DNA, 41 bp, Emericella nidulans
gttctcgagacgagcgatcgcgccgctcgctgcaccaatct

SEQ ID NO: 31694 - DNA, 41 bp, Emericella nidulans
gaattcactgcggccgccatgtaccgggagcaccccgactg

SEQ ID NO: 31695 - DNA, 50 bp, Emericella nidulans
gttctcgagacgagcgatcgctcactgcctttctaagaagaccactttgc

SEQ ID NO: 31696 - DNA, 42 bp, Emericella nidulans
gaattcactgcggccgccatgtgacgacgtcccttcaaggct

SEQ ID NO: 31697 - DNA, 41 bp, Emericella nidulans
gttctcgagacgagcgatcgccgccccaggcaatgcagtta

SEQ ID NO: 31698 - DNA, 42 bp, Emericella nidulans
gaattcactgcggccgccatgtcaatgcgggcgagaacaagc

SEQ ID NO: 31699 - DNA, 44 bp, Emericella nidulans
gttctcgagacgagcgatcgccatctgccattccctggagctga

SEQ ID NO: 31700 - DNA, 41 bp, Emericella nidulans
gaattcactgcggccgccatgcgaacccggccagagcagaa

SEQ ID NO: 31701 - DNA, 41 bp, Emericella nidulans
gttctcgagacgagcgatcgcttgcgggctcggacatacgg

SEQ ID NO: 31702 - DNA, 41 bp, Emericella nidulans
gaattcactgcggccgccatgttcgctgcatccctccgaca

SEQ ID NO: 31703 - DNA, 42 bp, Emericella nidulans
gttctcgagacgagcgatcgccggtggcattccagcctggtt

SEQ ID NO: 31704 - DNA, 53 bp, Emericella nidulans
gaattcactgcggccgccatgaagagcaaatttgtataattcgaagtagaggg

SEQ ID NO: 31705 - DNA, 42 bp, Emericella nidulans
gttctcgagacgagcgatcgcccacctctcctccctcgtcca

SEQ ID NO: 31706 - DNA, 44 bp, Emericella nidulans
gaattcactgcggccgccatgcgaagcgacgtcccaaaagaagc

SEQ ID NO: 31707 - DNA, 41 bp, Emericella nidulans
gttctcgagacgagcgatcgcgggcccttcaaacgccatgc

SEQ ID NO: 31708 - DNA, 44 bp, Emericella nidulans
gaattcactgcggccgccatgtcctcgcatccagaagctcctca

SEQ ID NO: 31709 - DNA, 41 bp, Emericella nidulans
gttctcgagacgagcgatcgcccgcgtgccatggccttagt

SEQ ID NO: 31710 - DNA, 41 bp, Emericella nidulans
gaattcactgcggccgccatgtcaccggcggccaagtcatt

SEQ ID NO: 31711 - DNA, 52 bp, Emericella nidulans
gttctcgagacgagcgatcgcaatcaggatatacccaaacccacagatagcg

SEQ ID NO: 31712 - DNA, 41 bp, Emericella nidulans
gaattcactgcggccgccatggtccgccgtcaagctgctcc

SEQ ID NO: 31713 - DNA, 47 bp, Emericella nidulans
gttctcgagacgagcgatcgccgcttttggctcttatagaccgttgg

SEQ ID NO: 31714 - DNA, 53 bp, Emericella nidulans
gaattcactgcggccgccatggaatcatatttttcccagagagccctcgctat

SEQ ID NO: 31715 - DNA, 47 bp, Emericella nidulans
gttctcgagacgagcgatcgcgcccaataagaaattccacagccagt

SEQ ID NO: 31716 - DNA, 47 bp, Emericella nidulans
gaattcactgcggccgccatgccaccaacctgatcacttttccaagc

SEQ ID NO: 31717 - DNA, 41 bp, Emericella nidulans
gttctcgagacgagcgatcgccccggaagaaacgcgccagt

SEQ ID NO: 31718 - DNA, 41 bp, Emericella nidulans
gaattcactgcggccgccatgtgacccatgtcgggaaccca

SEQ ID NO: 31719 - DNA, 41 bp, Emericella nidulans
gttctcgagacgagcgatcgccgccctcggggatagatgtg

SEQ ID NO: 31720 - DNA, 41 bp, Emericella nidulans
gaattcactgcggccgccatgccgctctcccacgcttccag

SEQ ID NO: 31721 - DNA, 41 bp, Emericella nidulans
gttctcgagacgagcgatcgcgcgcggacggcgttgtagtt

SEQ ID NO: 31722 - DNA, 42 bp, Emericella nidulans
gaattcactgcggccgccatgcgctgaagacacaggccgtca

SEQ ID NO: 31723 - DNA, 41 bp, Emericella nidulans
gttctcgagacgagcgatcgctgcccagctccggctctttc

SEQ ID NO: 31724 - DNA, 41 bp, Emericella nidulans; identical to SEQ ID NO: 31720

SEQ ID NO: 31725 - DNA, 41 bp, Emericella nidulans; identical to SEQ ID NO: 31721

SEQ ID NO: 31726 - DNA, 41 bp, Emericella nidulans
gaattcactgcggccgccatgctcgcccctggaatcaccgt

SEQ ID NO: 31727 - DNA, 57 bp, Emericella nidulans
gttctcgagacgagcgatcgctatacttcataagatttctaggggaaaacatacacc

SEQ ID NO: 31728 - DNA, 42 bp, Emericella nidulans
gaattcactgcggccgccatgccaccacctcctcccaagcct

SEQ ID NO: 31729 - DNA, 41 bp, Emericella nidulans
gttctcgagacgagcgatcgcacgactgtgggcgcgacaag

SEQ ID NO: 31730 - DNA, 43 bp, Emericella nidulans
gaattcactgcggccgccatgccccttctcgggttgcatgctt

SEQ ID NO: 31731 - DNA, 47 bp, Emericella nidulans
gttctcgagacgagcgatcgctcaagcataaccatgctcttttagcc

SEQ ID NO: 31732 - DNA, 46 bp, Emericella nidulans
gaattcactgcggccgccatgggtccaactaggccactgctaacaa

SEQ ID NO: 31733 - DNA, 45 bp, Emericella nidulans
gttctcgagacgagcgatcgcgcatgggtagcctccagatccttg

SEQ ID NO: 31734 - DNA, 41 bp, Emericella nidulans
gaattcactgcggccgccatgtcttgctcccagcgcgttca

SEQ ID NO: 31735 - DNA, 41 bp, Emericella nidulans
gttctcgagacgagcgatcgcgcccgccggagaatttcgat

SEQ ID NO: 31736 - DNA, 41 bp, Emericella nidulans
gaattcactgcggccgccatgccgcaggtgctggatttgga

SEQ ID NO: 31737 - DNA, 41 bp, Emericella nidulans
gttctcgagacgagcgatcgcggtcaccgatccgcccagtc

SEQ ID NO: 31738 - DNA, 44 bp, Emericella nidulans
gaattcactgcggccgccatgtcgctctttcacagcaacgggac

SEQ ID NO: 31739 - DNA, 43 bp, Emericella nidulans
gttctcgagacgagcgatcgctgcgcgaggatgattgtcgtgt

SEQ ID NO: 31740 - DNA, 43 bp, Emericella nidulans
gaattcactgcggccgccatggccttgttcgagcgtccagtcc

SEQ ID NO: 31741 - DNA, 44 bp, Emericella nidulans
gttctcgagacgagcgatcgcccgatcgacccgggttatcattg

SEQ ID NO: 31742 - DNA, 54 bp, Emericella nidulans
gaattcactgcggccgccatgtagactgtggtcttgcaaaataagtaccctttg

SEQ ID NO: 31743 - DNA, 44 bp, Emericella nidulans
gttctcgagacgagcgatcgcttccaaccagaaaagccttgagc

SEQ ID NO: 31744 - DNA, 47 bp, Emericella nidulans
gaattcactgcggccgccatgccagcatcctctactgctacggatgg

SEQ ID NO: 31745 - DNA, 41 bp, Emericella nidulans
gttctcgagacgagcgatcgccatcccggggtgtgaatccc

SEQ ID NO: 31746 - DNA, 46 bp, Emericella nidulans
gaattcactgcggccgccatgttttgtctctccctcgtgtaaagca

SEQ ID NO: 31747 - DNA, 41 bp, Emericella nidulans
gttctcgagacgagcgatcgctccggccccttcctccactc

SEQ ID NO: 31748 - DNA, 43 bp, Emericella nidulans
gaattcactgcggccgccatgtgacctttgacgctaacctaca

SEQ ID NO: 31749 - DNA, 55 bp, Emericella nidulans
gttctcgagacgagcgatcgcgactatagaagtcagttctgatctcataaacata

SEQ ID NO: 31750 - DNA, 41 bp, Emericella nidulans
gaattcactgcggccgccatggtatccgagcctttggacct

SEQ ID NO: 31751 - DNA, 41 bp, Emericella nidulans
gttctcgagacgagcgatcgcttctcgtcctcctccacaac

SEQ ID NO: 31752 - DNA, 41 bp, Emericella nidulans
gaattcactgcggccgccatgacctggcatcaacctaccag

SEQ ID NO: 31753 - DNA, 41 bp, Emericella nidulans
gttctcgagacgagcgatcgcgcattagggccaatgagtct

SEQ ID NO: 31754 - DNA, 41 bp, Emericella nidulans
gaattcactgcggccgccatgacagactgcggttctttgct

SEQ ID NO: 31755 - DNA, 41 bp, Emericella nidulans
gttctcgagacgagcgatcgcggtacttccttcatcggcac

SEQ ID NO: 31756 - DNA, 41 bp, Emericella nidulans
gaattcactgcggccgccatgggcaccgtcagtatcagctc

SEQ ID NO: 31757 - DNA, 41 bp, Emericella nidulans
gttctcgagacgagcgatcgctataaagtcgcctgcggatg

SEQ ID NO: 31758 - DNA, 41 bp, Emericella nidulans
gaattcactgcggccgccatgccattatcgcgactcgattt

SEQ ID NO: 31759 - DNA, 41 bp, Emericella nidulans
gttctcgagacgagcgatcgcgttgttctgtaccgcagacg

SEQ ID NO: 31760 - DNA, 40 bp, Emericella nidulans
gaattcactgcggccgccatgtccctgtggagaacctgat

SEQ ID NO: 31761 - DNA, 42 bp, Emericella nidulans
gttctcgagacgagcgatcgccctgtccttgtttggtaaagc

SEQ ID NO: 31762 - DNA, 40 bp, Emericella nidulans
gaattcactgcggccgccatgggtgcacaacctgcgatac

SEQ ID NO: 31763 - DNA, 39 bp, Emericella nidulans
gttctcgagacgagcgatcgctcccgcaactcctcaaac

SEQ ID NO: 31764 - DNA, 41 bp, Emericella nidulans
gaattcactgcggccgccatgagttgccggtaaatgaatgg

SEQ ID NO: 31765 - DNA, 41 bp, Emericella nidulans
gttctcgagacgagcgatcgcttgacgagcaggaaggtttc

SEQ ID NO: 31766 - DNA, 42 bp, Emericella nidulans
gaattcactgcggccgccatgggcatctctcgatctgttagg

SEQ ID NO: 31767 - DNA, 41 bp, Emericella nidulans
gttctcgagacgagcgatcgcgagccatcctttgcgtatgt

SEQ ID NO: 31768 - DNA, 44 bp, Emericella nidulans
gaattcactgcggccgccatgcagactgacttgagtaccgttat

SEQ ID NO: 31769 - DNA, 41 bp, Emericella nidulans
gttctcgagacgagcgatcgcgagctgcttgagttgctcct

SEQ ID NO: 31770 - DNA, 39 bp, Emericella nidulans
gaattcactgcggccgccatgtccgagtccctcttcctc

SEQ ID NO: 31771 - DNA, 40 bp, Emericella nidulans
gttctcgagacgagcgatcgctctccttggcgtccttgat

SEQ ID NO: 31772 - DNA, 41 bp, Emericella nidulans
gaattcactgcggccgccatgagacgctccagatcttccct

SEQ ID NO: 31773 - DNA, 41 bp, Emericella nidulans
gttctcgagacgagcgatcgcgttaaattgcctcgcccttt

SEQ ID NO: 31774 - DNA, 40 bp, Emericella nidulans
gaattcactgcggccgccatgtgaatgggtggcatacgtt

SEQ ID NO: 31775 - DNA, 39 bp, Emericella nidulans
gttctcgagacgagcgatcgctcggcatatacggctcct

SEQ ID NO: 31776 - DNA, 41 bp, Emericella nidulans
gaattcactgcggccgccatgcagacattacgggctgtcaa

SEQ ID NO: 31777 - DNA, 41 bp, Emericella nidulans
gttctcgagacgagcgatcgcaacttccactcgccattgat

SEQ ID NO: 31778 - DNA, 41 bp, Emericella nidulans
gaattcactgcggccgccatgatcttgcccgcatgatacag

SEQ ID NO: 31779 - DNA, 41 bp, Emericella nidulans
gttctcgagacgagcgatcgcccaaggtccaagtcttccaa

SEQ ID NO: 31780 - DNA, 39 bp, Emericella nidulans
gaattcactgcggccgccatgatctcggcaagctccttt

SEQ ID NO: 31781 - DNA, 41 bp, Emericella nidulans
gttctcgagacgagcgatcgcagtacggcttcagctcctcc

SEQ ID NO: 31782 - DNA, 43 bp, Emericella nidulans
gaattcactgcggccgccatgttggtaataaggtctggcttga

SEQ ID NO: 31783 - DNA, 41 bp, Emericella nidulans
gttctcgagacgagcgatcgccgttgagatggtgtagttgg

SEQ ID NO: 31784 - DNA, 41 bp, Emericella nidulans
gaattcactgcggccgccatgagcacggaaatttcatcgac

SEQ ID NO: 31785 - DNA, 40 bp, Emericella nidulans
gttctcgagacgagcgatcgcaccaaattctctccaatgc

SEQ ID NO: 31786 - DNA, 41 bp, Emericella nidulans
gaattcactgcggccgccatgaacccaacagctaccaccag

SEQ ID NO: 31787 - DNA, 41 bp, Emericella nidulans
gttctcgagacgagcgatcgcgcaagaaggtcatacgggac

SEQ ID NO: 31788 - DNA, 41 bp, Emericella nidulans
gaattcactgcggccgccatggtaatgcaccagccgggagt

SEQ ID NO: 31789 - DNA, 41 bp, Emericella nidulans
gttctcgagacgagcgatcgcgcttgaaatcgcagagcaat

SEQ ID NO: 31790 - DNA, 41 bp, Emericella nidulans
gaattcactgcggccgccatgcatggttttcgctctgttga

SEQ ID NO: 31791 - DNA, 46 bp, Emericella nidulans
gttctcgagacgagcgatcgctgtagatgacagcaaagttagttga

SEQ ID NO: 31792 - DNA, 42 bp, Emericella nidulans
gaattcactgcggccgccatggatctcgggaccagataaacc

SEQ ID NO: 31793 - DNA, 41 bp, Emericella nidulans
gttctcgagacgagcgatcgccgcagggtgtctactccaag

SEQ ID NO: 31794 - DNA, 48 bp, Emericella nidulans
gaattcactgcggccgccatgatcccatactcattctcactaactctc

SEQ ID NO: 31795 - DNA, 42 bp, Emericella nidulans
gttctcgagacgagcgatcgcttccatcccttcttcttctcc

SEQ ID NO: 31796 - DNA, 41 bp, Emericella nidulans
gaattcactgcggccgccatggcatccatgatgatgctctg

SEQ ID NO: 31797 - DNA, 43 bp, Emericella nidulans
gttctcgagacgagcgatcgcccaacagaaacgagtgagaaca

SEQ ID NO: 31798 - DNA, 39 bp, Emericella nidulans
gaattcactgcggccgccatgcacatcgatgcggcctat

SEQ ID NO: 31799 - DNA, 40 bp, Emericella nidulans
gttctcgagacgagcgatcgcaacacagtcagcccaaatg

SEQ ID NO: 31800 - DNA, 41 bp, Emericella nidulans
gaattcactgcggccgccatgtggcacgatgagtaacatcc

SEQ ID NO: 31801 - DNA, 41 bp, Emericella nidulans
gttctcgagacgagcgatcgctatccccagtcgaccagtgc

SEQ ID NO: 31802 - DNA, 41 bp, Emericella nidulans
gaattcactgcggccgccatgaaatcccagatgccagacct

SEQ ID NO: 31803 - DNA, 41 bp, Emericella nidulans
gttctcgagacgagcgatcgcacagctagcacgtgaagggt

SEQ ID NO: 31804 - DNA, 41 bp, Emericella nidulans
gaattcactgcggccgccatgatttacgcaatgcagccttt

SEQ ID NO: 31805 - DNA, 41 bp, Emericella nidulans
gttctcgagacgagcgatcgctagcccagtgagccttcagt

SEQ ID NO: 31806 - DNA, 40 bp, Emericella nidulans
gaattcactgcggccgccatgattgctgcccagctcaaac

SEQ ID NO: 31807 - DNA, 41 bp, Emericella nidulans
gttctcgagacgagcgatcgcgtggcaccattcaggcttat

SEQ ID NO: 31808 - DNA, 39 bp, Emericella nidulans
gaattcactgcggccgccatgcggccaaagaagttccag

SEQ ID NO: 31809 - DNA, 41 bp, Emericella nidulans
gttctcgagacgagcgatcgctgaatccggcagtattgctt

SEQ ID NO: 31810 - DNA, 40 bp, Emericella nidulans
gaattcactgcggccgccatgcttctggtcgtcgccttct

SEQ ID NO: 31811 - DNA, 41 bp, Emericella nidulans
gttctcgagacgagcgatcgcttacgtcccactaggctcca

SEQ ID NO: 31812 - DNA, 40 bp, Emericella nidulans
gaattcactgcggccgccatgaggtcaagcaggtcaaggt

SEQ ID NO: 31813 - DNA, 41 bp, Emericella nidulans
gttctcgagacgagcgatcgcatggtgccatcaataggagc

SEQ ID NO: 31814 - DNA, 41 bp, Emericella nidulans
gaattcactgcggccgccatggatcgatgaggatgactccc

SEQ ID NO: 31815 - DNA, 41 bp, Emericella nidulans
gttctcgagacgagcgatcgcccacatcccaacatgttcaa

SEQ ID NO: 31816 - DNA, 41 bp, Emericella nidulans
gaattcactgcggccgccatgcgtaaccgctagtgccaact

SEQ ID NO: 31817 - DNA, 41 bp, Emericella nidulans
gttctcgagacgagcgatcgccccgttatccttggtctcaa

SEQ ID NO: 31818 - DNA, 42 bp, Emericella nidulans
gaattcactgcggccgccatgccagcagcttacaaggaagtc

SEQ ID NO: 31819 - DNA, 41 bp, Emericella nidulans
gttctcgagacgagcgatcgcacatgttggtagggcacgtt

SEQ ID NO: 31820 - DNA, 39 bp, Emericella nidulans
gaattcactgcggccgccatgccgtcgtgctacaaatca

SEQ ID NO: 31821 - DNA, 41 bp, Emericella nidulans
gttctcgagacgagcgatcgcgggacgctcagtatttccat

SEQ ID NO: 31822 - DNA, 39 bp, Emericella nidulans; identical to SEQ ID NO: 31820

SEQ ID NO: 31823 - DNA, 41 bp, Emericella nidulans; identical to SEQ ID NO: 31821

SEQ ID NO: 31824 - DNA, 41 bp, Emericella nidulans
gaattcactgcggccgccatgatacccaccttcctgtatgc

SEQ ID NO: 31825 - DNA, 41 bp, Emericella nidulans
gttctcgagacgagcgatcgcccttgacaccctcgactttc

SEQ ID NO: 31826 - DNA, 41 bp, Emericella nidulans
gaattcactgcggccgccatgcaaactggtcccatcgttct

SEQ ID NO: 31827 - DNA, 41 bp, Emericella nidulans
gttctcgagacgagcgatcgcgcagcctgcacaaatgatta

SEQ ID NO: 31828 - DNA, 39 bp, Emericella nidulans
gaattcactgcggccgccatgccgttctggtggcaaatg

SEQ ID NO: 31829 - DNA, 42 bp, Emericella nidulans
gttctcgagacgagcgatcgctcaaccttccataccttgacc

SEQ ID NO: 31830 - DNA, 46 bp, Emericella nidulans
gaattcactgcggccgccatgcccattacaaaattaacattcatcc

SEQ ID NO: 31831 - DNA, 41 bp, Emericella nidulans
gttctcgagacgagcgatcgcttgtgagcgttagcccttct

SEQ ID NO: 31832 - DNA, 43 bp, Emericella nidulans
gaattcactgcggccgccatgctcacgaatctagcttctcatc

SEQ ID NO: 31833 - DNA, 41 bp, Emericella nidulans
gttctcgagacgagcgatcgcactccaccaggggctttaat

SEQ ID NO: 31834 - DNA, 41 bp, Emericella nidulans; identical to SEQ ID NO: 28626

SEQ ID NO: 31835 - DNA, 41 bp, Emericella nidulans
gttctcgagacgagcgatcgcaactcacaatgccaactccc

SEQ ID NO: 31836 - DNA, 41 bp, Emericella nidulans
gaattcactgcggccgccatgtctgtggcttcaacagcttg

SEQ ID NO: 31837 - DNA, 41 bp, Emericella nidulans
gttctcgagacgagcgatcgcattgagcccgctcatttcag

SEQ ID NO: 31838 - DNA, 41 bp, Emericella nidulans
gaattcactgcggccgccatgtcagtcagacatgacgcaca

SEQ ID NO: 31839 - DNA, 40 bp, Emericella nidulans
gttctcgagacgagcgatcgctcatcccatccacaacacc

SEQ ID NO: 31840 - DNA, 40 bp, Emericella nidulans
gaattcactgcggccgccatggtcttcggggtccttggat

SEQ ID NO: 31841 - DNA, 41 bp, Emericella nidulans
gttctcgagacgagcgatcgccgttcatcagaagagcgaca

SEQ ID NO: 31842 - DNA, 41 bp, Emericella nidulans
gaattcactgcggccgccatgggatccttgccatcactcat

SEQ ID NO: 31843 - DNA, 41 bp, Emericella nidulans
gttctcgagacgagcgatcgccagaagcggagtgttcatca

SEQ ID NO: 31844 - DNA, 46 bp, Emericella nidulans
gaattcactgcggccgccatggggactagtcacaaatacacctttg

SEQ ID NO: 31845 - DNA, 41 bp, Emericella nidulans
gttctcgagacgagcgatcgctcaagaagcacccaattcgt

SEQ ID NO: 31846 - DNA, 40 bp, Emericella nidulans
gaattcactgcggccgccatgtgaagacaagggtgaggtc

SEQ ID NO: 31847 - DNA, 41 bp, Emericella nidulans
gttctcgagacgagcgatcgccggagacctatcgcaaacag

SEQ ID NO: 31848 - DNA, 41 bp, Emericella nidulans
gaattcactgcggccgccatgggagtttgcgttgcctattc

SEQ ID NO: 31849 - DNA, 41 bp, Emericella nidulans
gttctcgagacgagcgatcgcatttctctcgctggactgga

SEQ ID NO: 31850 - DNA, 41 bp, Emericella nidulans
gaattcactgcggccgccatgcgagcagaccaagtccatta

SEQ ID NO: 31851 - DNA, 41 bp, Emericella nidulans
gttctcgagacgagcgatcgcccactggaggtagtcctcac

SEQ ID NO: 31852 - DNA, 40 bp, Emericella nidulans
gaattcactgcggccgccatgtttctcccatgatgctcct

SEQ ID NO: 31853 - DNA, 41 bp, Emericella nidulans
gttctcgagacgagcgatcgccaccagcacctgagatagca

SEQ ID NO: 31854 - DNA, 42 bp, Emericella nidulans
gaattcactgcggccgccatgttcattgttgagaagacaccc

SEQ ID NO: 31855 - DNA, 41 bp, Emericella nidulans
gttctcgagacgagcgatcgccgttccctcgtaaattgctc

SEQ ID NO: 31856 - DNA, 41 bp, Emericella nidulans
gaattcactgcggccgccatggagaacatcatttccgggtc

SEQ ID NO: 31857 - DNA, 41 bp, Emericella nidulans
gttctcgagacgagcgatcgcccgtgctctccaccatatct

SEQ ID NO: 31858 - DNA, 42 bp, Emericella nidulans
gaattcactgcggccgccatgctcctgtcatcttccataagc

SEQ ID NO: 31859 - DNA, 42 bp, Emericella nidulans
gttctcgagacgagcgatcgcccataacccatattcgtcagc

SEQ ID NO: 31860 - DNA, 41 bp, Emericella nidulans
gaattcactgcggccgccatgggaacaatgaccggctaaag

SEQ ID NO: 31861 - DNA, 41 bp, Emericella nidulans
gttctcgagacgagcgatcgcaagaatgcctttgttgttgg

SEQ ID NO: 31862 - DNA, 45 bp, Emericella nidulans
gaattcactgcggccgccatgtgcaactttaaacagattctttgc

SEQ ID NO: 31863 - DNA, 52 bp, Emericella nidulans
gttctcgagacgagcgatcgcttagttcctaattctactaaagtattttcaa

SEQ ID NO: 31864 - DNA, 39 bp, Emericella nidulans
gaattcactgcggccgccatgcgcacagcaatcgtgacc

SEQ ID NO: 31865 - DNA, 41 bp, Emericella nidulans; identical to SEQ ID NO: 28679

SEQ ID NO: 31866 - DNA, 43 bp, Emericella nidulans
gaattcactgcggccgccatgcttttgtgagatcgacgaagaa

SEQ ID NO: 31867 - DNA, 40 bp, Emericella nidulans
gttctcgagacgagcgatcgcctaacctccaccccagcat

SEQ ID NO: 31868 - DNA, 41 bp, Emericella nidulans
gaattcactgcggccgccatgctttttcaagggcagcctaa

SEQ ID NO: 31869 - DNA, 41 bp, Emericella nidulans
gttctcgagacgagcgatcgcttccgattctctccttctgg

SEQ ID NO: 31870 - DNA, 39 bp, Emericella nidulans
gaattcactgcggccgccatgctcgacgccaccaaaaag

SEQ ID NO: 31871 - DNA, 45 bp, Emericella nidulans
gttctcgagacgagcgatcgcttgacgtaccgtttagtgtatatc

SEQ ID NO: 31872 - DNA, 41 bp, Emericella nidulans
gaattcactgcggccgccatgcttcactgaccgcagctttc

SEQ ID NO: 31873 - DNA, 45 bp, Emericella nidulans
gttctcgagacgagcgatcgcgaggctgttgtctatagaatgtca

SEQ ID NO: 31874 - DNA, 41 bp, Emericella nidulans
gaattcactgcggccgccatgtcaacggagcagatgacttg

SEQ ID NO: 31875 - DNA, 41 bp, Emericella nidulans
gttctcgagacgagcgatcgcctgcaaggcctaatccactc

SEQ ID NO: 31876 - DNA, 41 bp, Emericella nidulans
gaattcactgcggccgccatgatggcaaggttgctctcatc

SEQ ID NO: 31877 - DNA, 41 bp, Emericella nidulans
gttctcgagacgagcgatcgctgttcgtacgggtatccatc

SEQ ID NO: 31878 - DNA, 39 bp, Emericella nidulans
gaattcactgcggccgccatgacctccatgcccgtaatc

SEQ ID NO: 31879 - DNA, 41 bp, Emericella nidulans
gttctcgagacgagcgatcgccgctgaaagcttccttcaat

SEQ ID NO: 31880 - DNA, 41 bp, Emericella nidulans
gaattcactgcggccgccatgtctgggattctgccacttgt

SEQ ID NO: 31881 - DNA, 40 bp, Emericella nidulans
gttctcgagacgagcgatcgcgcagccaagcgctatagaa

SEQ ID NO: 31882 - DNA, 41 bp, Emericella nidulans
gaattcactgcggccgccatgcatgagccactacgagaagg

SEQ ID NO: 31883 - DNA, 41 bp, Emericella nidulans
gttctcgagacgagcgatcgcttgcgcttctcttaaaccgt

SEQ ID NO: 31884 - DNA, 41 bp, Emericella nidulans
gaattcactgcggccgccatgcttgcgctaagactcccaac

SEQ ID NO: 31885 - DNA, 41 bp, Emericella nidulans
gttctcgagacgagcgatcgcgtctgctcaaacaacgcaat

SEQ ID NO: 31886 - DNA, 41 bp, Emericella nidulans
gaattcactgcggccgccatgtcttcgcagtccctaagagc

SEQ ID NO: 31887 - DNA, 41 bp, Emericella nidulans
gttctcgagacgagcgatcgccggattctgccttccttagc

SEQ ID NO: 31888 - DNA, 41 bp, Emericella nidulans
gaattcactgcggccgccatgggtggtggtgttggaaagtc

SEQ ID NO: 31889 - DNA, 41 bp, Emericella nidulans
gttctcgagacgagcgatcgcctctcaccaggctcgcttac

SEQ ID NO: 31890 - DNA, 39 bp, Emericella nidulans
gaattcactgcggccgccatgaccgcagtctgaccctga

SEQ ID NO: 31891 - DNA, 42 bp, Emericella nidulans
gttctcgagacgagcgatcgccctgagcgattcaataccaaa

SEQ ID NO: 31892 - DNA, 41 bp, Emericella nidulans
gaattcactgcggccgccatgttctccgcgagaaacttcat

SEQ ID NO: 31893 - DNA, 40 bp, Emericella nidulans
gttctcgagacgagcgatcgctgcacttctgggtgagtcc

SEQ ID NO: 31894 - DNA, 41 bp, Emericella nidulans
gaattcactgcggccgccatggatccccacattcaccactc

SEQ ID NO: 31895 - DNA, 41 bp, Emericella nidulans
gttctcgagacgagcgatcgcaggctccttgctgttgttgt

SEQ ID NO: 31896 - DNA, 41 bp, Emericella nidulans
gaattcactgcggccgccatgaaaagcgctcgatacaggtg

SEQ ID NO: 31897 - DNA, 41 bp, Emericella nidulans
gttctcgagacgagcgatcgcctctcggtgtttcttgggac

SEQ ID NO: 31898 - DNA, 41 bp, Emericella nidulans
gaattcactgcggccgccatgctccacctccaccattcatc

SEQ ID NO: 31899 - DNA, 42 bp, Emericella nidulans
gttctcgagacgagcgatcgcgtgcagaggagtaatgtagcc

SEQ ID NO: 31900 - DNA, 41 bp, Emericella nidulans
gaattcactgcggccgccatgacaacagcgtgacaggttca

SEQ ID NO: 31901 - DNA, 46 bp, Emericella nidulans
gttctcgagacgagcgatcgctgcattcgttttctctaaaagatgt

SEQ ID NO: 31902 - DNA, 45 bp, Emericella nidulans
gaattcactgcggccgccatgtccttctttcgaaaaatagctagg

SEQ ID NO: 31903 - DNA, 41 bp, Emericella nidulans
gttctcgagacgagcgatcgccaagatgtccaacctgctga

SEQ ID NO: 31904 - DNA, 41 bp, Emericella nidulans
gaattcactgcggccgccatgtctgcatgatgctccagttc

SEQ ID NO: 31905 - DNA, 42 bp, Emericella nidulans
gttctcgagacgagcgatcgcctcttccttcatttccagctc

SEQ ID NO: 31906 - DNA, 41 bp, Emericella nidulans
gaattcactgcggccgccatgatgcatccacaaatcgcata

SEQ ID NO: 31907 - DNA, 41 bp, Emericella nidulans
gttctcgagacgagcgatcgctgaattcgcttgtcttcacc

SEQ ID NO: 31908 - DNA, 41 bp, Emericella nidulans
gaattcactgcggccgccatgttcgaccctgtatcgacctc

SEQ ID NO: 31909 - DNA, 43 bp, Emericella nidulans
gttctcgagacgagcgatcgctgaacaatatggttcgaggaga

SEQ ID NO: 31910 - DNA, 41 bp, Emericella nidulans
gaattcactgcggccgccatgcgaattcaacaggctagagg

SEQ ID NO: 31911 - DNA, 41 bp, Emericella nidulans
gttctcgagacgagcgatcgcaccttctcccactcgacctt

SEQ ID NO: 31912 - DNA, 50 bp, Emericella nidulans
gaattcactgcggccgccatgtaattaagactattcaaacaactggaaga

SEQ ID NO: 31913 - DNA, 41 bp, Emericella nidulans
gttctcgagacgagcgatcgcgaagtaaggcattgcccatc

SEQ ID NO: 31914 - DNA, 41 bp, Emericella nidulans
gaattcactgcggccgccatgcgtcccaaaactaacccaga

SEQ ID NO: 31915 - DNA, 41 bp, Emericella nidulans
gttctcgagacgagcgatcgcgttgtcaccgtctgcaacac

SEQ ID NO: 31916 - DNA, 41 bp, Emericella nidulans
gaattcactgcggccgccatgtggtatgcactctccccttc

SEQ ID NO: 31917 - DNA, 41 bp, Emericella nidulans
gttctcgagacgagcgatcgctaacaccacgaacgtttcca

SEQ ID NO: 31918 - DNA, 41 bp, Emericella nidulans
gaattcactgcggccgccatggacgactgggaccaactagg

SEQ ID NO: 31919 - DNA, 41 bp, Emericella nidulans
gttctcgagacgagcgatcgcgtttggctctccgggatact

SEQ ID NO: 31920 - DNA, 44 bp, Emericella nidulans
gaattcactgcggccgccatgtccgtctacgataacaatgtcac

SEQ ID NO: 31921 - DNA, 39 bp, Emericella nidulans
gttctcgagacgagcgatcgcaccgtcgcactccttctg

SEQ ID NO: 31922 - DNA, 41 bp, Emericella nidulans
gaattcactgcggccgccatgtcgacaatgacacaagctcc

SEQ ID NO: 31923 - DNA, 41 bp, Emericella nidulans
gttctcgagacgagcgatcgcccccattagcgctcatacac

SEQ ID NO: 31924 - DNA, 41 bp, Emericella nidulans
gaattcactgcggccgccatgaacaagcgaaaccatcaagc

SEQ ID NO: 31925 - DNA, 42 bp, Emericella nidulans
gttctcgagacgagcgatcgctctgaaagaccagtcccaaaa

SEQ ID NO: 31926 - DNA, 41 bp, Emericella nidulans
gaattcactgcggccgccatgctcctttccagcacctccta

SEQ ID NO: 31927 - DNA, 47 bp, Emericella nidulans
gttctcgagacgagcgatcgctcgacatagatatagcaagaagaagg

SEQ ID NO: 31928 - DNA, 40 bp, Emericella nidulans
gaattcactgcggccgccatgccgcaagacctttacgtgt

SEQ ID NO: 31929 - DNA, 41 bp, Emericella nidulans
gttctcgagacgagcgatcgcccgctttgcatgttagtgaa

SEQ ID NO: 31930 - DNA, 42 bp, Emericella nidulans
gaattcactgcggccgccatgttgaatgcatcaatactaggg

SEQ ID NO: 31931 - DNA, 41 bp, Emericella nidulans
gttctcgagacgagcgatcgcagctgagcggagatcacaat

SEQ ID NO: 31932 - DNA, 40 bp, Emericella nidulans
gaattcactgcggccgccatgagctacccagccagcactc

SEQ ID NO: 31933 - DNA, 41 bp, Emericella nidulans
gttctcgagacgagcgatcgccaatcaaagcagagcagcag

SEQ ID NO: 31934 - DNA, 42 bp, Emericella nidulans
gaattcactgcggccgccatgggctggacacagataagatcg

SEQ ID NO: 31935 - DNA, 41 bp, Emericella nidulans
gttctcgagacgagcgatcgctttctctggctcctctgcat

SEQ ID NO: 31936 - DNA, 41 bp, Emericella nidulans
gaattcactgcggccgccatgtttggggcacttatagcctc

SEQ ID NO: 31937 - DNA, 43 bp, Emericella nidulans
gttctcgagacgagcgatcgccatgtagctcgatatgaagacg

SEQ ID NO: 31938 - DNA, 41 bp, Emericella nidulans
gaattcactgcggccgccatgcgagggagcatactcttcca

SEQ ID NO: 31939 - DNA, 41 bp, Emericella nidulans
gttctcgagacgagcgatcgccgggtaagagctggagtctg

SEQ ID NO: 31940 - DNA, 41 bp, Emericella nidulans
gaattcactgcggccgccatgtcagctggactgcctatgtg

SEQ ID NO: 31941 - DNA, 45 bp, Emericella nidulans
gttctcgagacgagcgatcgctcatcaaatccaaacttcttctca

SEQ ID NO: 31942 - DNA, 41 bp, Emericella nidulans
gaattcactgcggccgccatgcgggtccaaaacaatcaagt

SEQ ID NO: 31943 - DNA, 45 bp, Emericella nidulans
gttctcgagacgagcgatcgcccaagataatcccacataaaatga

SEQ ID NO: 31944 - DNA, 39 bp, Emericella nidulans
gaattcactgcggccgccatgagtgcactggtccccatc

SEQ ID NO: 31945 - DNA, 41 bp, Emericella nidulans
gttctcgagacgagcgatcgcctcagaagccagctttgcat

SEQ ID NO: 31946 - DNA, 41 bp, Emericella nidulans
gaattcactgcggccgccatgcgccatggaatacttgaagg

SEQ ID NO: 31947 - DNA, 42 bp, Emericella nidulans
gttctcgagacgagcgatcgcggtaatgagataggcctgcac

SEQ ID NO: 31948 - DNA, 42 bp, Emericella nidulans
gaattcactgcggccgccatgctgtaaagaccaaccgagact

SEQ ID NO: 31949 - DNA, 41 bp, Emericella nidulans
gttctcgagacgagcgatcgcctggcgtattcacgacacat

SEQ ID NO: 31950 - DNA, 44 bp, Emericella nidulans
gaattcactgcggccgccatgaacatggtcagatacgattacct

SEQ ID NO: 31951 - DNA, 41 bp, Emericella nidulans
gttctcgagacgagcgatcgccagatccagactggacaccc

SEQ ID NO: 31952 - DNA, 41 bp, Emericella nidulans
gaattcactgcggccgccatgcttacgaacgcgaacgctac

SEQ ID NO: 31953 - DNA, 41 bp, Emericella nidulans
gttctcgagacgagcgatcgcgacgggaagtctgaggtaga

SEQ ID NO: 31954 - DNA, 41 bp, Emericella nidulans
gaattcactgcggccgccatgagcttggcctgacgactatg

SEQ ID NO: 31955 - DNA, 41 bp, Emericella nidulans
gttctcgagacgagcgatcgccacccactcctgtacatgct

SEQ ID NO: 31956 - DNA, 41 bp, Emericella nidulans
gaattcactgcggccgccatgggagggggctcattaattgt

SEQ ID NO: 31957 - DNA, 51 bp, Emericella nidulans
gttctcgagacgagcgatcgctgagcttctataaaatagcttaaatacaca

SEQ ID NO: 31958 - DNA, 41 bp, Emericella nidulans
gaattcactgcggccgccatggttggccaagctcaatgttc

SEQ ID NO: 31959 - DNA, 41 bp, Emericella nidulans
gttctcgagacgagcgatcgcttctgtccttccccatcttc

SEQ ID NO: 31960 - DNA, 41 bp, Emericella nidulans
gaattcactgcggccgccatgaacaggagtcgtcaccaaaa

SEQ ID NO: 31961 - DNA, 41 bp, Emericella nidulans
gttctcgagacgagcgatcgcctttcctggtgaaaggatgc

SEQ ID NO: 31962 - DNA, 43 bp, Emericella nidulans
gaattcactgcggccgccatggacctagctatcatgttggtga

SEQ ID NO: 31963 - DNA, 41 bp, Emericella nidulans
gttctcgagacgagcgatcgcgctatcctgtccacctccaa

SEQ ID NO: 31964 - DNA, 41 bp, Emericella nidulans
gaattcactgcggccgccatgctgtatcctgggctgtggtt

SEQ ID NO: 31965 - DNA, 41 bp, Emericella nidulans
gttctcgagacgagcgatcgcaaccttccatccatcctcct

SEQ ID NO: 31966 - DNA, 41 bp, Emericella nidulans
gaattcactgcggccgccatggtctggcgacggttactgat

SEQ ID NO: 31967 - DNA, 41 bp, Emericella nidulans
gttctcgagacgagcgatcgcggcgttctggaaaagggtta

SEQ ID NO: 31968 - DNA, 41 bp, Emericella nidulans
gaattcactgcggccgccatggattcagccaattgagggac

SEQ ID NO: 31969 - DNA, 41 bp, Emericella nidulans
gttctcgagacgagcgatcgccgagacaatcttcgtgcaaa

SEQ ID NO: 31970 - DNA, 46 bp, Emericella nidulans
gaattcactgcggccgccatgctaacatctactcatcatgggatac

SEQ ID NO: 31971 - DNA, 41 bp, Emericella nidulans
gttctcgagacgagcgatcgcctgtttccccgacacaacat

SEQ ID NO: 31972 - DNA, 41 bp, Emericella nidulans
gaattcactgcggccgccatgctgccatgttcaaggatcag

SEQ ID NO: 31973 - DNA, 41 bp, Emericella nidulans
gttctcgagacgagcgatcgcaatgggatcgagaccaactg

SEQ ID NO: 31974 - DNA, 41 bp, Emericella nidulans
gaattcactgcggccgccatgattcgcaacctgtacctcgt

SEQ ID NO: 31975 - DNA, 41 bp, Emericella nidulans
gttctcgagacgagcgatcgccggcgactcaataagctcct

SEQ ID NO: 31976 - DNA, 41 bp, Emericella nidulans
gaattcactgcggccgccatgaaaacaacgtccaagaccgt

SEQ ID NO: 31977 - DNA, 41 bp, Emericella nidulans
gttctcgagacgagcgatcgcacctgcagctggaagacatc

SEQ ID NO: 31978 - DNA, 47 bp, Emericella nidulans
gaattcactgcggccgccatggagtacctagtttctaaaaataccca

SEQ ID NO: 31979 - DNA, 41 bp, Emericella nidulans
gttctcgagacgagcgatcgcccacttccaatatcggttgc

SEQ ID NO: 31980 - DNA, 39 bp, Emericella nidulans
gaattcactgcggccgccatgaccaaagcaagcgagcag

SEQ ID NO: 31981 - DNA, 42 bp, Emericella nidulans
gttctcgagacgagcgatcgcccgcttcctcattctcttctt

SEQ ID NO: 31982 - DNA, 39 bp, Emericella nidulans
gaattcactgcggccgccatgcttggcgattgcttacgg

SEQ ID NO: 31983 - DNA, 41 bp, Emericella nidulans
gttctcgagacgagcgatcgccgctcccagaattcatcctt

SEQ ID NO: 31984 - DNA, 42 bp, Emericella nidulans
gaattcactgcggccgccatgtcctaattcaggatgacgaga

SEQ ID NO: 31985 - DNA, 39 bp, Emericella nidulans
gttctcgagacgagcgatcgcataccgctccaagcatcg

SEQ ID NO: 31986 - DNA, 41 bp, Emericella nidulans
gaattcactgcggccgccatgcccgtattccgagtatccct

SEQ ID NO: 31987 - DNA, 42 bp, Emericella nidulans
gttctcgagacgagcgatcgccccaacatatggcggtataga

SEQ ID NO: 31988 - DNA, 41 bp, Emericella nidulans
gaattcactgcggccgccatgcgttctcacgacagacaagc

SEQ ID NO: 31989 - DNA, 41 bp, Emericella nidulans
gttctcgagacgagcgatcgccagccctgtagcctcaactc

SEQ ID NO: 31990 - DNA, 41 bp, Emericella nidulans
gaattcactgcggccgccatgttcacccctgacttggctac

SEQ ID NO: 31991 - DNA, 41 bp, Emericella nidulans
gttctcgagacgagcgatcgctcacgagagctaccctcacc

SEQ ID NO: 31992 - DNA, 42 bp, Emericella nidulans
gaattcactgcggccgccatgtggaagtgaagaccacgtctc

SEQ ID NO: 31993 - DNA, 41 bp, Emericella nidulans
gttctcgagacgagcgatcgcaacaggctcttacgccttca

SEQ ID NO: 31994 - DNA, 41 bp, Emericella nidulans
gaattcactgcggccgccatggaagcggctaaaaatcatgg

SEQ ID NO: 31995 - DNA, 41 bp, Emericella nidulans
gttctcgagacgagcgatcgcgccaaaaatgagagcaggag

SEQ ID NO: 31996 - DNA, 41 bp, Emericella nidulans
gaattcactgcggccgccatggcaaaaagctgaccttgaaa

SEQ ID NO: 31997 - DNA, 41 bp, Emericella nidulans
gttctcgagacgagcgatcgctgaagaagctgttgctgctg

SEQ ID NO: 31998 - DNA, 42 bp, Emericella nidulans
gaattcactgcggccgccatgtctacctaggtcggctgttca

SEQ ID NO: 31999 - DNA, 41 bp, Emericella nidulans
gttctcgagacgagcgatcgcaaaggtgcgacgagactgac

SEQ ID NO: 32000 - DNA, 40 bp, Emericella nidulans
gaattcactgcggccgccatgcgcccacaaattagacgac

SEQ ID NO: 32001 - DNA, 43 bp, Emericella nidulans
gttctcgagacgagcgatcgcgatatcaacagtctatggagcc

SEQ ID NO: 32002 - DNA, 45 bp, Emericella nidulans
gaattcactgcggccgccatggacccgtttttagctataatccaa

SEQ ID NO: 32003 - DNA, 41 bp, Emericella nidulans
gttctcgagacgagcgatcgcccaatcaacaacgcttcctt

SEQ ID NO: 32004 - DNA, 44 bp, Emericella nidulans
gaattcactgcggccgccatgagtgagcttgttagcctatcctg

SEQ ID NO: 32005 - DNA, 42 bp, Emericella nidulans
gttctcgagacgagcgatcgcttcagcaatctttacagcaat

SEQ ID NO: 32006 - DNA, 41 bp, Emericella nidulans
gaattcactgcggccgccatggctcattgaaatgggctttg

SEQ ID NO: 32007 - DNA, 41 bp, Emericella nidulans
gttctcgagacgagcgatcgcttgagtgactcgccaaagaa

SEQ ID NO: 32008 - DNA, 42 bp, Emericella nidulans
gaattcactgcggccgccatgccagttctggaagaagaatgc

SEQ ID NO: 32009 - DNA, 44 bp, Emericella nidulans
gttctcgagacgagcgatcgcaacaaattcttggtgtttttgga

SEQ ID NO: 32010 - DNA, 41 bp, Emericella nidulans
gaattcactgcggccgccatgtagaaggcgagggaaggatt

SEQ ID NO: 32011 - DNA, 42 bp, Emericella nidulans
gttctcgagacgagcgatcgctgccttctaaacgaaacttca

SEQ ID NO: 32012 - DNA, 53 bp, Emericella nidulans
gaattcactgcggccgccatgacttctgatatatcagtttttaccatatttcc

SEQ ID NO: 32013 - DNA, 41 bp, Emericella nidulans
gttctcgagacgagcgatcgcaaatgcctctggattgttcg

SEQ ID NO: 32014 - DNA, 41 bp, Emericella nidulans
gaattcactgcggccgccatgaacatgtcgacgaggtcagg

SEQ ID NO: 32015 - DNA, 41 bp, Emericella nidulans
gttctcgagacgagcgatcgctgttgccggggtttaaaaat

SEQ ID NO: 32016 - DNA, 41 bp, Emericella nidulans
gaattcactgcggccgccatgacaaacgtccacgtctacca

SEQ ID NO: 32017 - DNA, 40 bp, Emericella nidulans
gttctcgagacgagcgatcgccatccgagacgatgctgtc

SEQ ID NO: 32018 - DNA, 42 bp, Emericella nidulans
gaattcactgcggccgccatgcgtctgttcgtgtacaacctg

SEQ ID NO: 32019 - DNA, 42 bp, Emericella nidulans
gttctcgagacgagcgatcgccctcggagaagtaagtcgtga

SEQ ID NO: 32020 - DNA, 41 bp, Emericella nidulans
gaattcactgcggccgccatggcggtcaaaatcagtttcaa

SEQ ID NO: 32021 - DNA, 42 bp, Emericella nidulans
gttctcgagacgagcgatcgcgacggactagaatcaggggag

SEQ ID NO: 32022 - DNA, 41 bp, Emericella nidulans
gaattcactgcggccgccatgcattgccatgttcgtctttg

SEQ ID NO: 32023 - DNA, 41 bp, Emericella nidulans
gttctcgagacgagcgatcgcttgatgatcgcagtgacctg

SEQ ID NO: 32024 - DNA, 42 bp, Emericella nidulans; identical to SEQ ID NO: 32008

SEQ ID NO: 32025 - DNA, 41 bp, Emericella nidulans
gttctcgagacgagcgatcgctcttgggattggatgaggtc

SEQ ID NO: 32026 - DNA, 44 bp, Emericella nidulans
gaattcactgcggccgccatgtgactgactgactgacaaaagga

SEQ ID NO: 32027 - DNA, 42 bp, Emericella nidulans
gttctcgagacgagcgatcgccgagcctgttctcttttcttg

SEQ ID NO: 32028 - DNA, 41 bp, Emericella nidulans
gaattcactgcggccgccatgatgggatcctaagctgcaaa

SEQ ID NO: 32029 - DNA, 41 bp, Emericella nidulans
gttctcgagacgagcgatcgcaacgactgccatccgtttac

SEQ ID NO: 32030 - DNA, 41 bp, Emericella nidulans
gaattcactgcggccgccatgctacagccatttccgcttta

SEQ ID NO: 32031 - DNA, 41 bp, Emericella nidulans
gttctcgagacgagcgatcgccatccataccgtgggaagac

SEQ ID NO: 32032 - DNA, 41 bp, Emericella nidulans
gaattcactgcggccgccatggatcctcctccttgatggtg

SEQ ID NO: 32033 - DNA, 41 bp, Emericella nidulans
gttctcgagacgagcgatcgccggtcagtgaagggatgaat

SEQ ID NO: 32034 - DNA, 39 bp, Emericella nidulans
gaattcactgcggccgccatggaatcgctattgcgggac

SEQ ID NO: 32035 - DNA, 41 bp, Emericella nidulans
gttctcgagacgagcgatcgcatcgactgaaaaatcgagcc

SEQ ID NO: 32036 - DNA, 41 bp, Emericella nidulans
gaattcactgcggccgccatgtcttcacataggcaaaccca

SEQ ID NO: 32037 - DNA, 52 bp, Emericella nidulans
gttctcgagacgagcgatcgcgatactctaacacttgtttactattgactgg

SEQ ID NO: 32038 - DNA, 40 bp, Emericella nidulans
gaattcactgcggccgccatgagagctcgggtttcgtgtc

SEQ ID NO: 32039 - DNA, 41 bp, Emericella nidulans
gttctcgagacgagcgatcgcaataccgaaaacggggattc

SEQ ID NO: 32040 - DNA, 41 bp, Emericella nidulans
gaattcactgcggccgccatgacctgccataacaatgcaca

SEQ ID NO: 32041 - DNA, 41 bp, Emericella nidulans
gttctcgagacgagcgatcgcgtgcaaaagggcatctcact

SEQ ID NO: 32042 - DNA, 41 bp, Emericella nidulans
gaattcactgcggccgccatgacggatctgcagtcaaaagc

SEQ ID NO: 32043 - DNA, 42 bp, Emericella nidulans
gttctcgagacgagcgatcgccccaccaatcaaataaaacga

SEQ ID NO: 32044 - DNA, 43 bp, Emericella nidulans
gaattcactgcggccgccatgtgatgggtcatcttctggtaca

SEQ ID NO: 32045 - DNA, 41 bp, Emericella nidulans
gttctcgagacgagcgatcgcacctttgtcaatgcggtctc

SEQ ID NO: 32046 - DNA, 56 bp, Emericella nidulans
gaattcactgcggccgccatgtctgtagagtagatataagagatagtcatactaaa

SEQ ID NO: 32047 - DNA, 41 bp, Emericella nidulans
gttctcgagacgagcgatcgcactgcaggcttcaggcaata

SEQ ID NO: 32048 - DNA, 45 bp, Emericella nidulans
gaattcactgcggccgccatgtcactccattactttcagaaaagc

SEQ ID NO: 32049 - DNA, 41 bp, Emericella nidulans
gttctcgagacgagcgatcgcgtcaatgcgccttccaatac

SEQ ID NO: 32050 - DNA, 39 bp, Emericella nidulans
gaattcactgcggccgccatgccaggggacatctagctt

SEQ ID NO: 32051 - DNA, 41 bp, Emericella nidulans
gttctcgagacgagcgatcgcatccgctcaagagctcatct

SEQ ID NO: 32052 - DNA, 40 bp, Emericella nidulans
gaattcactgcggccgccatgacgagcgcatggtctatga

SEQ ID NO: 32053 - DNA, 41 bp, Emericella nidulans
gttctcgagacgagcgatcgccctcgttttccttcatctcg

SEQ ID NO: 32054 - DNA, 41 bp, Emericella nidulans
gaattcactgcggccgccatgcggttgagcagtggtgtatg

SEQ ID NO: 32055 - DNA, 41 bp, Emericella nidulans
gttctcgagacgagcgatcgccctgctccttcccatcatag

SEQ ID NO: 32056 - DNA, 41 bp, Emericella nidulans
gaattcactgcggccgccatgtggaaaattccgtaccaagc

SEQ ID NO: 32057 - DNA, 41 bp, Emericella nidulans
gttctcgagacgagcgatcgcgaagatcaggatagcggtgc

SEQ ID NO: 32058 - DNA, 40 bp, Emericella nidulans
gaattcactgcggccgccatgggaggagatggcagaaagc

SEQ ID NO: 32059 - DNA, 39 bp, Emericella nidulans
gttctcgagacgagcgatcgcacaaacgcccagttcgac

SEQ ID NO: 32060 - DNA, 46 bp, Emericella nidulans
gaattcactgcggccgccatggggtatatttttgggtatatcaatc

SEQ ID NO: 32061 - DNA, 41 bp, Emericella nidulans
gttctcgagacgagcgatcgcactttcatcatacggctccc

SEQ ID NO: 32062 - DNA, 41 bp, Emericella nidulans
gaattcactgcggccgccatgacagtcagagggaccaccaa

SEQ ID NO: 32063 - DNA, 41 bp, Emericella nidulans
gttctcgagacgagcgatcgcctgaatggcagatcaaaccc

SEQ ID NO: 32064 - DNA, 41 bp, Emericella nidulans
gaattcactgcggccgccatgagactcacaaccacgctcag

SEQ ID NO: 32065 - DNA, 41 bp, Emericella nidulans
gttctcgagacgagcgatcgctgaggacggagccataaaag

SEQ ID NO: 32066 - DNA, 41 bp, Emericella nidulans
gaattcactgcggccgccatgctattttcgacattccgatg

SEQ ID NO: 32067 - DNA, 41 bp, Emericella nidulans
gttctcgagacgagcgatcgcttttaccgaatgtgatacgc

SEQ ID NO: 32068 - DNA, 41 bp, Emericella nidulans
gaattcactgcggccgccatggtggctgttgaaatgggact

SEQ ID NO: 32069 - DNA, 41 bp, Emericella nidulans
gttctcgagacgagcgatcgccattcacggcaacttccttt

SEQ ID NO: 32070 - DNA, 41 bp, Emericella nidulans
gaattcactgcggccgccatgaaatttcgaaagctcagcag

SEQ ID NO: 32071 - DNA, 41 bp, Emericella nidulans
gttctcgagacgagcgatcgcttttagctggtcgcgaatct

SEQ ID NO: 32072 - DNA, 41 bp, Emericella nidulans
gaattcactgcggccgccatgtcacgcaacttatcgtgcat

SEQ ID NO: 32073 - DNA, 41 bp, Emericella nidulans
gttctcgagacgagcgatcgcccaaagaacaaccgaactgc

SEQ ID NO: 32074 - DNA, 41 bp, Emericella nidulans
gaattcactgcggccgccatgtagatacccgccatgtcctt

SEQ ID NO: 32075 - DNA, 41 bp, Emericella nidulans
gttctcgagacgagcgatcgcctcttaaacgccagagcacc

SEQ ID NO: 32076 - DNA, 44 bp, Emericella nidulans
gaattcactgcggccgccatgtccttagtgccctataccttgtt

SEQ ID NO: 32077 - DNA, 40 bp, Emericella nidulans
gttctcgagacgagcgatcgcgaccgtcgttttcgttcaa

SEQ ID NO: 32078 - DNA, 42 bp, Emericella nidulans
gaattcactgcggccgccatgtagcatcatctctctcgtgtt

SEQ ID NO: 32079 - DNA, 41 bp, Emericella nidulans
gttctcgagacgagcgatcgcagccgcttgtatcaactggt

SEQ ID NO: 32080 - DNA, 41 bp, Emericella nidulans
gaattcactgcggccgccatgtatccgaaaactgggctacg

SEQ ID NO: 32081 - DNA, 41 bp, Emericella nidulans
gttctcgagacgagcgatcgccctctgctccacaaaccatt

SEQ ID NO: 32082 - DNA, 41 bp, Emericella nidulans
gaattcactgcggccgccatgcgaggatcatgccaaagatt

SEQ ID NO: 32083 - DNA, 42 bp, Emericella nidulans
gttctcgagacgagcgatcgccctccgattctaactccttgc

SEQ ID NO: 32084 - DNA, 41 bp, Emericella nidulans
gaattcactgcggccgccatgacgcattgccttgtttatcc

SEQ ID NO: 32085 - DNA, 41 bp, Emericella nidulans
gttctcgagacgagcgatcgccgttcacctctgctcttttg

SEQ ID NO: 32086 - DNA, 42 bp, Emericella nidulans
gaattcactgcggccgccatggaatcagatggggatggtttt

SEQ ID NO: 32087 - DNA, 41 bp, Emericella nidulans
gttctcgagacgagcgatcgcagcccgaacaagaacttacg

SEQ ID NO: 32088 - DNA, 40 bp, Emericella nidulans
gaattcactgcggccgccatgaacatcggtgcaatgatcc

SEQ ID NO: 32089 - DNA, 41 bp, Emericella nidulans
gttctcgagacgagcgatcgcgccttgttgtttccaaggtc

SEQ ID NO: 32090 - DNA, 42 bp, Emericella nidulans
gaattcactgcggccgccatgcgcacataccacataatcagc

SEQ ID NO: 32091 - DNA, 41 bp, Emericella nidulans
gttctcgagacgagcgatcgcggtatccgagttgacctcca

SEQ ID NO: 32092 - DNA, 41 bp, Emericella nidulans
gaattcactgcggccgccatgggcccatgtgctgattagag

SEQ ID NO: 32093 - DNA, 41 bp, Emericella nidulans
gttctcgagacgagcgatcgcgctaaggacgatcatgccac

SEQ ID NO: 32094 - DNA, 41 bp, Emericella nidulans
gaattcactgcggccgccatgattaggccttccatgaccaa

SEQ ID NO: 32095 - DNA, 40 bp, Emericella nidulans
gttctcgagacgagcgatcgcggcggtcggattagaattg

SEQ ID NO: 32096 - DNA, 41 bp, Emericella nidulans
gaattcactgcggccgccatgcagccaacaggactctagcc

SEQ ID NO: 32097 - DNA, 41 bp, Emericella nidulans
gttctcgagacgagcgatcgctggcactggtaacaaaccaa

SEQ ID NO: 32098 - DNA, 41 bp, Emericella nidulans
gaattcactgcggccgccatgccgtcaacctcgctatctct

SEQ ID NO: 32099 - DNA, 41 bp, Emericella nidulans
gttctcgagacgagcgatcgctcctaacaaaaagcgctaca

SEQ ID NO: 32100 - DNA, 41 bp, Emericella nidulans
gaattcactgcggccgccatgtcttggggttggttaggaaa

SEQ ID NO: 32101 - DNA, 42 bp, Emericella nidulans
gttctcgagacgagcgatcgcgccattactcccataagaccc

SEQ ID NO: 32102 - DNA, 42 bp, Emericella nidulans
gaattcactgcggccgccatgccctaaatacctgcaacctcc

SEQ ID NO: 32103 - DNA, 41 bp, Emericella nidulans
gttctcgagacgagcgatcgcccctcagagcggattacatt

SEQ ID NO: 32104 - DNA, 42 bp, Emericella nidulans; identical to SEQ ID NO: 32102

SEQ ID NO: 32105 - DNA, 41 bp, Emericella nidulans; identical to SEQ ID NO: 32103

SEQ ID NO: 32106 - DNA, 41 bp, Emericella nidulans
gaattcactgcggccgccatggctcatcggcctctgataac

SEQ ID NO: 32107 - DNA, 41 bp, Emericella nidulans
gttctcgagacgagcgatcgcggaacgcatgtcctcagtgt

SEQ ID NO: 32108 - DNA, 41 bp, Emericella nidulans
gaattcactgcggccgccatgcggacaaagtcatgagacga

SEQ ID NO: 32109 - DNA, 40 bp, Emericella nidulans
gttctcgagacgagcgatcgccaagccagaagagcgcata

SEQ ID NO: 32110 - DNA, 42 bp, Emericella nidulans
gaattcactgcggccgccatgcttccttcagatccacgtcag

SEQ ID NO: 32111 - DNA, 41 bp, Emericella nidulans
gttctcgagacgagcgatcgctgataaagcgcagaacgaaa

SEQ ID NO: 32112 - DNA, 42 bp, Emericella nidulans
gaattcactgcggccgccatgtttcaaagctcactctgaccc

SEQ ID NO: 32113 - DNA, 41 bp, Emericella nidulans
gttctcgagacgagcgatcgctatggagtcgaggatgtcca

SEQ ID NO: 32114 - DNA, 41 bp, Emericella nidulans
gaattcactgcggccgccatgtgtgttcgcatcaaacatga

SEQ ID NO: 32115 - DNA, 44 bp, Emericella nidulans
gttctcgagacgagcgatcgccgaggtgtaaaatacattgaact

SEQ ID NO: 32116 - DNA, 47 bp, Emericella nidulans
gaattcactgcggccgccatgtggattctcatagtgtatgtatagcc

SEQ ID NO: 32117 - DNA, 41 bp, Emericella nidulans
gttctcgagacgagcgatcgcagcatccatgctcctcaagt

SEQ ID NO: 32118 - DNA, 41 bp, Emericella nidulans
gaattcactgcggccgccatgtgcgagcgtggtgatattag

SEQ ID NO: 32119 - DNA, 41 bp, Emericella nidulans
gttctcgagacgagcgatcgcgtagcagccgaagatgtgct

SEQ ID NO: 32120 - DNA, 41 bp, Emericella nidulans
gaattcactgcggccgccatgcccgctcagtctacgactct

SEQ ID NO: 32121 - DNA, 41 bp, Emericella nidulans
gttctcgagacgagcgatcgctggtgacatcctcagtctca

SEQ ID NO: 32122 - DNA, 41 bp, Emericella nidulans
gaattcactgcggccgccatgtatccgtttaatccccatgc

SEQ ID NO: 32123 - DNA, 41 bp, Emericella nidulans
gttctcgagacgagcgatcgctaaggttcctcgctgtcgat

SEQ ID NO: 32124 - DNA, 41 bp, Emericella nidulans
gaattcactgcggccgccatgtctctagcaggctcgctctt

SEQ ID NO: 32125 - DNA, 40 bp, Emericella nidulans
gttctcgagacgagcgatcgcgaggacatgcgacttgcac

SEQ ID NO: 32126 - DNA, 45 bp, Emericella nidulans
gaattcactgcggccgccatgcatgatgttataagcgtcaatgaa

SEQ ID NO: 32127 - DNA, 41 bp, Emericella nidulans
gttctcgagacgagcgatcgcctgcaccatacggatgaaga

SEQ ID NO: 32128 - DNA, 41 bp, Emericella nidulans
gaattcactgcggccgccatggaggataatggacccagcaa

SEQ ID NO: 32129 - DNA, 41 bp, Emericella nidulans
gttctcgagacgagcgatcgctccgttctgtacctgcatag

SEQ ID NO: 32130 - DNA, 41 bp, Emericella nidulans
gaattcactgcggccgccatgtggatcccatcgaccttaat

SEQ ID NO: 32131 - DNA, 42 bp, Emericella nidulans
gttctcgagacgagcgatcgcaagcgtttgtccttgttctca

SEQ ID NO: 32132 - DNA, 43 bp, Emericella nidulans
gaattcactgcggccgccatgcgcatatcaacatgctagagaa

SEQ ID NO: 32133 - DNA, 41 bp, Emericella nidulans
gttctcgagacgagcgatcgcgactggacgcagtgaacaca

SEQ ID NO: 32134 - DNA, 40 bp, Emericella nidulans
gaattcactgcggccgccatgagtccgtcgccgaacttcc

SEQ ID NO: 32135 - DNA, 41 bp, Emericella nidulans
gttctcgagacgagcgatcgctctcacggtccttggctatc

SEQ ID NO: 32136 - DNA, 39 bp, Emericella nidulans
gaattcactgcggccgccatgagcggtctggcttcaatg

SEQ ID NO: 32137 - DNA, 41 bp, Emericella nidulans
gttctcgagacgagcgatcgcgaagctgcttctcctccttg

SEQ ID NO: 32138 - DNA, 42 bp, Emericella nidulans
gaattcactgcggccgccatgtcgtggcttgaagagatcatt

SEQ ID NO: 32139 - DNA, 40 bp, Emericella nidulans
gttctcgagacgagcgatcgcctgcaccaatcgtgcatcc

SEQ ID NO: 32140 - DNA, 39 bp, Emericella nidulans
gaattcactgcggccgccatgccgcagcttatcctgcat

SEQ ID NO: 32141 - DNA, 41 bp, Emericella nidulans
gttctcgagacgagcgatcgctgctggtgcgtctattcttg

SEQ ID NO: 32142 - DNA, 45 bp, Emericella nidulans
gaattcactgcggccgccatgcaattcgttctttcagagtctcac

SEQ ID NO: 32143 - DNA, 41 bp, Emericella nidulans
gttctcgagacgagcgatcgctcggggtatctcgcagtcta

SEQ ID NO: 32144 - DNA, 40 bp, Emericella nidulans
gaattcactgcggccgccatggcgcagtcgtggaaagata

SEQ ID NO: 32145 - DNA, 41 bp, Emericella nidulans
gttctcgagacgagcgatcgcaaagctttgccaaggtcaac

SEQ ID NO: 32146 - DNA, 39 bp, Emericella nidulans
gaattcactgcggccgccatgtctctgcacgcgagcttc

SEQ ID NO: 32147 - DNA, 41 bp, Emericella nidulans
gttctcgagacgagcgatcgccgatctctcaatgccctctt

SEQ ID NO: 32148 - DNA, 41 bp, Emericella nidulans
gaattcactgcggccgccatgtacggcgcataccataacaa

SEQ ID NO: 32149 - DNA, 39 bp, Emericella nidulans
gttctcgagacgagcgatcgcagctttgtcgtcggggtt

SEQ ID NO: 32150 - DNA, 41 bp, Emericella nidulans
gaattcactgcggccgccatgcgcgggaatcttcgataaac

SEQ ID NO: 32151 - DNA, 41 bp, Emericella nidulans
gttctcgagacgagcgatcgcaaaaccccaatcggcttaac

SEQ ID NO: 32152 - DNA, 40 bp, Emericella nidulans
gaattcactgcggccgccatgacaaaccatatcccgaagg

SEQ ID NO: 32153 - DNA, 41 bp, Emericella nidulans
gttctcgagacgagcgatcgcatggaacggagacaactgaa

SEQ ID NO: 32154 - DNA, 41 bp, Emericella nidulans
gaattcactgcggccgccatgtacctgtcgctgggagtttc

SEQ ID NO: 32155 - DNA, 41 bp, Emericella nidulans
gttctcgagacgagcgatcgctaaacatgcccagcataatc

SEQ ID NO: 32156 - DNA, 41 bp, Emericella nidulans
gaattcactgcggccgccatgctgtctatgctctccgggtg

SEQ ID NO: 32157 - DNA, 42 bp, Emericella nidulans
gttctcgagacgagcgatcgctcagctttgagttaccaggga

SEQ ID NO: 32158 - DNA, 43 bp, Emericella nidulans
gaattcactgcggccgccatgggtcagggaatgaacgtttcta

SEQ ID NO: 32159 - DNA, 41 bp, Emericella nidulans
gttctcgagacgagcgatcgcgaggcctctggtggtctatg

SEQ ID NO: 32160 - DNA, 40 bp, Emericella nidulans
gaattcactgcggccgccatgggatgatttcctgggcact

SEQ ID NO: 32161 - DNA, 39 bp, Emericella nidulans
gttctcgagacgagcgatcgctctctgctgtgtcgctca

SEQ ID NO: 32162 - DNA, 41 bp, Emericella nidulans
gaattcactgcggccgccatgggtgctcgaccagtacacct

SEQ ID NO: 32163 - DNA, 41 bp, Emericella nidulans
gttctcgagacgagcgatcgcagatcataatcgccagcaca

SEQ ID NO: 32164 - DNA, 41 bp, Emericella nidulans
gaattcactgcggccgccatgccattatagccatcggttcg

SEQ ID NO: 32165 - DNA, 41 bp, Emericella nidulans
gttctcgagacgagcgatcgctttcccttgaaatcgtttgg

SEQ ID NO: 32166 - DNA, 42 bp, Emericella nidulans
gaattcactgcggccgccatgagattcttgtcaaccgtcagc

SEQ ID NO: 32167 - DNA, 41 bp, Emericella nidulans
gttctcgagacgagcgatcgccgaccatctcggcatctaat

SEQ ID NO: 32168 - DNA, 41 bp, Emericella nidulans
gaattcactgcggccgccatgagtcgattctaggcgttcca

SEQ ID NO: 32169 - DNA, 41 bp, Emericella nidulans; identical to SEQ ID NO: 32123

SEQ ID NO: 32170 - DNA, 41 bp, Emericella nidulans
gaattcactgcggccgccatggctctccaaccttcgacaaa

SEQ ID NO: 32171 - DNA, 41 bp, Emericella nidulans
gttctcgagacgagcgatcgccactgcagtgacagtcagca

SEQ ID NO: 32172 - DNA, 41 bp, Emericella nidulans
gaattcactgcggccgccatgcgaaccatgcatgagcttta

SEQ ID NO: 32173 - DNA, 41 bp, Emericella nidulans
gttctcgagacgagcgatcgcgaggttcctgctgctgaatc

SEQ ID NO: 32174 - DNA, 41 bp, Emericella nidulans
gaattcactgcggccgccatgttccgctacgttcgaaaaac

SEQ ID NO: 32175 - DNA, 42 bp, Emericella nidulans
gttctcgagacgagcgatcgcggtgtctaggaagccttctgc

SEQ ID NO: 32176 - DNA, 42 bp, Emericella nidulans
gaattcactgcggccgccatgccagaaggctgagaccttacc

SEQ ID NO: 32177 - DNA, 43 bp, Emericella nidulans
gttctcgagacgagcgatcgccatggatagtacgacaacttga

SEQ ID NO: 32178 - DNA, 40 bp, Emericella nidulans
gaattcactgcggccgccatgagtgccccaaacaaagagg

SEQ ID NO: 32179 - DNA, 41 bp, Emericella nidulans
gttctcgagacgagcgatcgcgccgctgattcctttaactg

SEQ ID NO: 32180 - DNA, 41 bp, Emericella nidulans
gaattcactgcggccgccatggcgcgcatattgctattttt

SEQ ID NO: 32181 - DNA, 42 bp, Emericella nidulans
gttctcgagacgagcgatcgcaaatttaacctcgttcgtgga

SEQ ID NO: 32182 - DNA, 41 bp, Emericella nidulans
gaattcactgcggccgccatgtctggttgaaatggtgggtt

SEQ ID NO: 32183 - DNA, 40 bp, Emericella nidulans
gttctcgagacgagcgatcgccgcgaataatacgctgcat

SEQ ID NO: 32184 - DNA, 41 bp, Emericella nidulans
gaattcactgcggccgccatgcggccatgtccttgactact

SEQ ID NO: 32185 - DNA, 41 bp, Emericella nidulans
gttctcgagacgagcgatcgcatacggtctttcagccactc

SEQ ID NO: 32186 - DNA, 41 bp, Emericella nidulans
gaattcactgcggccgccatgggctctaacgggcataatca

SEQ ID NO: 32187 - DNA, 41 bp, Emericella nidulans
gttctcgagacgagcgatcgcatccagcctttgcaccttta

SEQ ID NO: 32188 - DNA, 42 bp, Emericella nidulans
gaattcactgcggccgccatgggcttcatcatgaagttccct

SEQ ID NO: 32189 - DNA, 53 bp, Emericella nidulans
gttctcgagacgagcgatcgcgacatgagttagtgaacaatatgactagataa

SEQ ID NO: 32190 - DNA, 41 bp, Emericella nidulans
gaattcactgcggccgccatggtcctccgtgggaaatacct

SEQ ID NO: 32191 - DNA, 41 bp, Emericella nidulans
gttctcgagacgagcgatcgcgagaagggtcaacccgaagt

SEQ ID NO: 32192 - DNA, 41 bp, Emericella nidulans
gaattcactgcggccgccatgaagtcgaccgcaattttgac

SEQ ID NO: 32193 - DNA, 44 bp, Emericella nidulans
gttctcgagacgagcgatcgccaactcgagtctcaagttttctt

SEQ ID NO: 32194 - DNA, 39 bp, Emericella nidulans
gaattcactgcggccgccatgccgtctctgtcgccagtc

SEQ ID NO: 32195 - DNA, 44 bp, Emericella nidulans
gttctcgagacgagcgatcgctgtgcattggtttaagaaatctg

SEQ ID NO: 32196 - DNA, 41 bp, Emericella nidulans
gaattcactgcggccgccatggaagacaaggagcgggctat

SEQ ID NO: 32197 - DNA, 40 bp, Emericella nidulans
gttctcgagacgagcgatcgcttgtcaagaacggcagcat

SEQ ID NO: 32198 - DNA, 41 bp, Emericella nidulans
gaattcactgcggccgccatgctatcccaaagcgctgtctc

SEQ ID NO: 32199 - DNA, 41 bp, Emericella nidulans
gttctcgagacgagcgatcgcccatccactcttccacgatt

SEQ ID NO: 32200 - DNA, 41 bp, Emericella nidulans
gaattcactgcggccgccatgccggggtgaggagactaaat

SEQ ID NO: 32201 - DNA, 41 bp, Emericella nidulans
gttctcgagacgagcgatcgcaggcagtgagctcctggata

SEQ ID NO: 32202 - DNA, 45 bp, Emericella nidulans
gaattcactgcggccgccatgttatctatcatggaaggctaccca

SEQ ID NO: 32203 - DNA, 41 bp, Emericella nidulans
gttctcgagacgagcgatcgccaggaggggtatcgagatca

SEQ ID NO: 32204 - DNA, 41 bp, Emericella nidulans
gaattcactgcggccgccatgaccatcttcgcgtcattgat

SEQ ID NO: 32205 - DNA, 40 bp, Emericella nidulans
gttctcgagacgagcgatcgcaaaggagcggttgcaattt

SEQ ID NO: 32206 - DNA, 43 bp, Emericella nidulans
gaattcactgcggccgccatgcccctcagttctactctcaagc

SEQ ID NO: 32207 - DNA, 40 bp, Emericella nidulans
gttctcgagacgagcgatcgcggtcaccggtcgaaaagag

SEQ ID NO: 32208 - DNA, 41 bp, Emericella nidulans
gaattcactgcggccgccatgggtgcagttttgatgatccc

SEQ ID NO: 32209 - DNA, 41 bp, Emericella nidulans
gttctcgagacgagcgatcgccaatcgccgtgttgttacag

SEQ ID NO: 32210 - DNA, 57 bp, Emericella nidulans
gaattcactgcggccgccatgtaacgatcactatctgaatatactccatatgctaac

SEQ ID NO: 32211 - DNA, 41 bp, Emericella nidulans
gttctcgagacgagcgatcgctgctgcgctatgactttcaa

SEQ ID NO: 32212 - DNA, 41 bp, Emericella nidulans
gaattcactgcggccgccatggggttttggagggaattctt

SEQ ID NO: 32213 - DNA, 40 bp, Emericella nidulans
gttctcgagacgagcgatcgcctgcgtagcatcatccacc

SEQ ID NO: 32214 - DNA, 41 bp, Emericella nidulans
gaattcactgcggccgccatgccgttcgccttctaatgaaa

SEQ ID NO: 32215 - DNA, 41 bp, Emericella nidulans
gttctcgagacgagcgatcgcctttttgcggtggaaaagac

SEQ ID NO: 32216 - DNA, 41 bp, Emericella nidulans
gaattcactgcggccgccatgcgtgcaattcgacaagatca

SEQ ID NO: 32217 - DNA, 41 bp, Emericella nidulans
gttctcgagacgagcgatcgcttttcaagcccatcttccac

SEQ ID NO: 32218 - DNA, 41 bp, Emericella nidulans
gaattcactgcggccgccatgggcgaacagctcctgtatca

SEQ ID NO: 32219 - DNA, 44 bp, Emericella nidulans
gttctcgagacgagcgatcgccgtacactcgtctatcttgcaca

SEQ ID NO: 32220 - DNA, 44 bp, Emericella nidulans
gaattcactgcggccgccatgcctcaaattgatgctagacaacc

SEQ ID NO: 32221 - DNA, 41 bp, Emericella nidulans
gttctcgagacgagcgatcgcatgcgagctcgaattgtttt

SEQ ID NO: 32222 - DNA, 41 bp, Emericella nidulans
gaattcactgcggccgccatgaggacatggctttacggcta

SEQ ID NO: 32223 - DNA, 41 bp, Emericella nidulans
gttctcgagacgagcgatcgcgttcgacctcttgcttcgac

SEQ ID NO: 32224 - DNA, 41 bp, Emericella nidulans
gaattcactgcggccgccatgatccgacctcttcgaatcct

SEQ ID NO: 32225 - DNA, 41 bp, Emericella nidulans
gttctcgagacgagcgatcgccctagcagctgaccagattg

SEQ ID NO: 32226 - DNA, 41 bp, Emericella nidulans
gaattcactgcggccgccatggcctggcagaccatattgat

SEQ ID NO: 32227 - DNA, 42 bp, Emericella nidulans
gttctcgagacgagcgatcgccttggctttcagatgatcgac

SEQ ID NO: 32228 - DNA, 40 bp, Emericella nidulans
gaattcactgcggccgccatggttggcgatttaacggtct

SEQ ID NO: 32229 - DNA, 41 bp, Emericella nidulans
gttctcgagacgagcgatcgcggtgttgagcttctgcatca

SEQ ID NO: 32230 - DNA, 41 bp, Emericella nidulans
gaattcactgcggccgccatgttttccccctcttgaggttc

SEQ ID NO: 32231 - DNA, 40 bp, Emericella nidulans
gttctcgagacgagcgatcgccagctgcatgtcctctgtt

SEQ ID NO: 32232 - DNA, 40 bp, Emericella nidulans; identical to SEQ ID NO: 32228

SEQ ID NO: 32233 - DNA, 41 bp, Emericella nidulans; identical to SEQ ID NO: 32229

SEQ ID NO: 32234 - DNA, 45 bp, Emericella nidulans
gaattcactgcggccgccatgcaacgattttaattcaacgattca

SEQ ID NO: 32235 - DNA, 41 bp, Emericella nidulans
gttctcgagacgagcgatcgcattggtcttttgttgcaccc

SEQ ID NO: 32236 - DNA, 41 bp, Emericella nidulans
gaattcactgcggccgccatgcgccagaagcattgtctgat

SEQ ID NO: 32237 - DNA, 41 bp, Emericella nidulans
gttctcgagacgagcgatcgcactctcccgtttcagcacct

SEQ ID NO: 32238 - DNA, 41 bp, Emericella nidulans
gaattcactgcggccgccatgtgtctatcctgccgaatgtc

SEQ ID NO: 32239 - DNA, 41 bp, Emericella nidulans
gttctcgagacgagcgatcgccgagcttcttcacgtcctct

SEQ ID NO: 32240 - DNA, 41 bp, Emericella nidulans
gaattcactgcggccgccatgcgtgtgtggggtttgaagat

SEQ ID NO: 32241 - DNA, 42 bp, Emericella nidulans
gttctcgagacgagcgatcgcgctgacttacgaaaagcgttg

SEQ ID NO: 32242 - DNA, 42 bp, Emericella nidulans
gaattcactgcggccgccatggctgcttggtttttagatgga

SEQ ID NO: 32243 - DNA, 40 bp, Emericella nidulans
gttctcgagacgagcgatcgcatccacacagggcttctcc

SEQ ID NO: 32244 - DNA, 43 bp, Emericella nidulans
gaattcactgcggccgccatgtgacgagatccgttcataattg

SEQ ID NO: 32245 - DNA, 41 bp, Emericella nidulans
gttctcgagacgagcgatcgccgcgcttctctagcagactt

SEQ ID NO: 32246 - DNA, 41 bp, Emericella nidulans
gaattcactgcggccgccatgcagtccggcgacgacgtcaa

SEQ ID NO: 32247 - DNA, 42 bp, Emericella nidulans
gttctcgagacgagcgatcgcctggcccccgtgtgggtaatc

SEQ ID NO: 32248 - DNA, 42 bp, Emericella nidulans
gaattcactgcggccgccatgggttcgttcaccgaggcgaca

SEQ ID NO: 32249 - DNA, 48 bp, Emericella nidulans
gttctcgagacgagcgatcgctcaacctagaccttgaagccataccca

SEQ ID NO: 32250 - DNA, 50 bp, Emericella nidulans
gaattcactgcggccgccatgatgtcctccaagtacgtcttcacaaaagg

SEQ ID NO: 32251 - DNA, 41 bp, Emericella nidulans
gttctcgagacgagcgatcgctgggagtgtgcgggttgtgc

SEQ ID NO: 32252 - DNA, 44 bp, Emericella nidulans
gaattcactgcggccgccatgtcctcggtggttccgtagcaggt

SEQ ID NO: 32253 - DNA, 42 bp, Emericella nidulans
gttctcgagacgagcgatcgcggtcgccaaagaagccccaag

SEQ ID NO: 32254 - DNA, 41 bp, Emericella nidulans
gaattcactgcggccgccatgtgggctggtggtctggcaat

SEQ ID NO: 32255 - DNA, 42 bp, Emericella nidulans
gttctcgagacgagcgatcgcgaaccttgggccaccagcgta

SEQ ID NO: 32256 - DNA, 41 bp, Emericella nidulans
gaattcactgcggccgccatgccttcggggctgatgcttgc

SEQ ID NO: 32257 - DNA, 41 bp, Emericella nidulans
gttctcgagacgagcgatcgccgccccgtcccgcaatagtt

SEQ ID NO: 32258 - DNA, 41 bp, Emericella nidulans
gaattcactgcggccgccatgcacccagcgcacctcccaac

SEQ ID NO: 32259 - DNA, 41 bp, Emericella nidulans
gttctcgagacgagcgatcgctgcgacgcaccatgtcaccc

SEQ ID NO: 32260 - DNA, 41 bp, Emericella nidulans
gaattcactgcggccgccatggtccgccatcggtctcccac

SEQ ID NO: 32261 - DNA, 42 bp, Emericella nidulans
gttctcgagacgagcgatcgctcgccgctgttctctcgacat

SEQ ID NO: 32262 - DNA, 40 bp, Emericella nidulans
gaattcactgcggccgccatgcgccagagggagcgaccgt

SEQ ID NO: 32263 - DNA, 43 bp, Emericella nidulans
gttctcgagacgagcgatcgcccaccttggaccacccctttcc

SEQ ID NO: 32264 - DNA, 41 bp, Emericella nidulans
gaattcactgcggccgccatgggcgaacactcctcggcacc

SEQ ID NO: 32265 - DNA, 48 bp, Emericella nidulans
gttctcgagacgagcgatcgcatttttcgttcctcgcactacctctcc

SEQ ID NO: 32266 - DNA, 41 bp, Emericella nidulans
gaattcactgcggccgccatgttgtgctggagggcgaggtg

SEQ ID NO: 32267 - DNA, 41 bp, Emericella nidulans
gttctcgagacgagcgatcgctactcgaccgcacgccgatg

SEQ ID NO: 32268 - DNA, 42 bp, Emericella nidulans
gaattcactgcggccgccatggcggcaatgctttcagcaacg

SEQ ID NO: 32269 - DNA, 41 bp, Emericella nidulans
gttctcgagacgagcgatcgctcgcgcctcgaactgaacca

SEQ ID NO: 32270 - DNA, 41 bp, Emericella nidulans
gaattcactgcggccgccatgcatcggccgacttccacggt

SEQ ID NO: 32271 - DNA, 53 bp, Emericella nidulans
gttctcgagacgagcgatcgcgatgttatttggcgttcttatcaaatcaatgc

SEQ ID NO: 32272 - DNA, 55 bp, Emericella nidulans
gaattcactgcggccgccatgatgagaacaaatcctactacttcaaatccagagg

SEQ ID NO: 32273 - DNA, 57 bp, Emericella nidulans
gttctcgagacgagcgatcgctgtcgcactcatagctacagctctaactcgattatt

SEQ ID NO: 32274 - DNA, 43 bp, Emericella nidulans
gaattcactgcggccgccatgtgaccccgatttcgaacctcca

SEQ ID NO: 32275 - DNA, 49 bp, Emericella nidulans
gttctcgagacgagcgatcgctttctcttctctcgtcctcttcttttga

SEQ ID NO: 32276 - DNA, 50 bp, Emericella nidulans
gaattcactgcggccgccatggacctcaatcagtatactttggaccagga

SEQ ID NO: 32277 - DNA, 42 bp, Emericella nidulans
gttctcgagacgagcgatcgcccagcctgctgggtaagcaga

SEQ ID NO: 32278 - DNA, 45 bp, Emericella nidulans
gaattcactgcggccgccatgtcaccagtctcggcggaataatcg

SEQ ID NO: 32279 - DNA, 41 bp, Emericella nidulans
gttctcgagacgagcgatcgcccgctcccccaaaaaccaca

SEQ ID NO: 32280 - DNA, 45 bp, Emericella nidulans
gaattcactgcggccgccatgcgctaccctgcgtaacctcattcg

SEQ ID NO: 32281 - DNA, 41 bp, Emericella nidulans
gttctcgagacgagcgatcgcgccgccacggagagcaagaa

SEQ ID NO: 32282 - DNA, 46 bp, Emericella nidulans
gaattcactgcggccgccatgcggctatttcgggcatactttgagg

SEQ ID NO: 32283 - DNA, 49 bp, Emericella nidulans
gttctcgagacgagcgatcgcgtcggcctttatcttcccaaatacctcc

SEQ ID NO: 32284 - DNA, 45 bp, Emericella nidulans
gaattcactgcggccgccatgtgttcacatggaacctttccccac

SEQ ID NO: 32285 - DNA, 41 bp, Emericella nidulans
gttctcgagacgagcgatcgcccgacggtggccatggaagt

SEQ ID NO: 32286 - DNA, 53 bp, Emericella nidulans
gaattcactgcggccgccatgatggatggaatcaaatatgcagtatttacaga

SEQ ID NO: 32287 - DNA, 57 bp, Emericella nidulans
gttctcgagacgagcgatcgcagttcttttctttctaagaggtggaatagaataacc

SEQ ID NO: 32288 - DNA, 41 bp, Emericella nidulans
gaattcactgcggccgccatggccgactctccctgcgttgg

SEQ ID NO: 32289 - DNA, 41 bp, Emericella nidulans
gttctcgagacgagcgatcgcctctgcccgcgtcgaaggag

SEQ ID NO: 32290 - DNA, 41 bp, Emericella nidulans
gaattcactgcggccgccatgcagccggcggatcaacttcg

SEQ ID NO: 32291 - DNA, 43 bp, Emericella nidulans
gttctcgagacgagcgatcgcgccaacgaactcaagcccgaga

SEQ ID NO: 32292 - DNA, 43 bp, Emericella nidulans
gaattcactgcggccgccatgccgcttcgatccatccctaccc

SEQ ID NO: 32293 - DNA, 41 bp, Emericella nidulans
gttctcgagacgagcgatcgcaccgcccaccactcgcttgt

SEQ ID NO: 32294 - DNA, 43 bp, Emericella nidulans
gaattcactgcggccgccatgtgcctctttcggtggaacagca

SEQ ID NO: 32295 - DNA, 43 bp, Emericella nidulans
gttctcgagacgagcgatcgctggccgaagatgcttccgtttg

SEQ ID NO: 32296 - DNA, 41 bp, Emericella nidulans
gaattcactgcggccgccatgcgcgccatcatcccgatctc

SEQ ID NO: 32297 - DNA, 53 bp, Emericella nidulans
gttctcgagacgagcgatcgcttttgataaaataaatccgtcctcgaacttcc

SEQ ID NO: 32298 - DNA, 42 bp, Emericella nidulans
gaattcactgcggccgccatgccggttcggtgcttctcatgc

SEQ ID NO: 32299 - DNA, 50 bp, Emericella nidulans
gttctcgagacgagcgatcgcacctaataactcgagatgcttaccgcaga

SEQ ID NO: 32300 - DNA, 41 bp, Emericella nidulans
gaattcactgcggccgccatgcaatggcggcaggctgaaga

SEQ ID NO: 32301 - DNA, 42 bp, Emericella nidulans
gttctcgagacgagcgatcgcgggacagcacgttgggtctcg

SEQ ID NO: 32302 - DNA, 57 bp, Emericella nidulans
gaattcactgcggccgccatgtatcagcatcaatagttaactggtttttctcaatca

SEQ ID NO: 32303 - DNA, 47 bp, Emericella nidulans
gttctcgagacgagcgatcgccagccgtacttccatctctcggtatg

SEQ ID NO: 32304 - DNA, 41 bp, Emericella nidulans
gaattcactgcggccgccatgcttgctcgccgcaaggatgc

SEQ ID NO: 32305 - DNA, 41 bp, Emericella nidulans
gttctcgagacgagcgatcgccgcaccaggaggcaggctct

SEQ ID NO: 32306 - DNA, 55 bp, Emericella nidulans
gaattcactgcggccgccatgcaaggtacatacctacaattctcatttcagttcg

SEQ ID NO: 32307 - DNA, 41 bp, Emericella nidulans
gttctcgagacgagcgatcgcgcctgcgccaaggcttgaga

SEQ ID NO: 32308 - DNA, 48 bp, Emericella nidulans
gaattcactgcggccgccatggctctacccaactctgaaaggcgatca

SEQ ID NO: 32309 - DNA, 45 bp, Emericella nidulans
gttctcgagacgagcgatcgcaaatccttccagtccagcagttcc

SEQ ID NO: 32310 - DNA, 50 bp, Emericella nidulans
gaattcactgcggccgccatgggagcctacgaacactagctatccgatca

SEQ ID NO: 32311 - DNA, 50 bp, Emericella nidulans
gttctcgagacgagcgatcgcaaaccgtaacgaagatgttcttggcaacc

SEQ ID NO: 32312 - DNA, 41 bp, Emericella nidulans
gaattcactgcggccgccatgaacccccaaaggccgtcgtc

SEQ ID NO: 32313 - DNA, 41 bp, Emericella nidulans
gttctcgagacgagcgatcgcccgcgaatcctacgcgcaac

SEQ ID NO: 32314 - DNA, 49 bp, Emericella nidulans
gaattcactgcggccgccatgcaggaacttgcataaacaccatcgaacc

SEQ ID NO: 32315 - DNA, 47 bp, Emericella nidulans
gttctcgagacgagcgatcgcgcttctcagcagggtcaaaatctccc

SEQ ID NO: 32316 - DNA, 41 bp, Emericella nidulans
gaattcactgcggccgccatggcaccttgtcctgccctgac

SEQ ID NO: 32317 - DNA, 43 bp, Emericella nidulans
gttctcgagacgagcgatcgccgactgcaccttgtcggtcctg

SEQ ID NO: 32318 - DNA, 46 bp, Emericella nidulans
gaattcactgcggccgccatgtcacatggaacctttccccacttca

SEQ ID NO: 32319 - DNA, 52 bp, Emericella nidulans
gttctcgagacgagcgatcgcctcatcagacaccacaaaaggtgttagttca

SEQ ID NO: 32320 - DNA, 50 bp, Emericella nidulans
gaattcactgcggccgccatggcttgctcctagctctgtcaaaataatca

SEQ ID NO: 32321 - DNA, 42 bp, Emericella nidulans
gttctcgagacgagcgatcgcgcgcctgctttttcccctgct

SEQ ID NO: 32322 - DNA, 46 bp, Emericella nidulans; identical to SEQ ID NO: 32318

SEQ ID NO: 32323 - DNA, 52 bp, Emericella nidulans; identical to SEQ ID NO: 32319

SEQ ID NO: 32324 - DNA, 50 bp, Emericella nidulans
gaattcactgcggccgccatgctccatatactacaattcagcgcgacagc

SEQ ID NO: 32325 - DNA, 41 bp, Emericella nidulans
gttctcgagacgagcgatcgcggcggagtccacggtcccta

SEQ ID NO: 32326 - DNA, 53 bp, Emericella nidulans
gaattcactgcggccgccatgcaaccgaacaatcgaactattgtcctttatac

SEQ ID NO: 32327 - DNA, 43 bp, Emericella nidulans
gttctcgagacgagcgatcgcggcgttgtcgacaagcgtctca

SEQ ID NO: 32328 - DNA, 54 bp, Emericella nidulans
gaattcactgcggccgccatgtggtaacaccatcaggtaaatatagtccgacct

SEQ ID NO: 32329 - DNA, 42 bp, Emericella nidulans
gttctcgagacgagcgatcgcgagacgggtcttgcgccagtg

SEQ ID NO: 32330 - DNA, 46 bp, Emericella nidulans
gaattcactgcggccgccatgcgctcttccttgctttcccatttca

SEQ ID NO: 32331 - DNA, 42 bp, Emericella nidulans
gttctcgagacgagcgatcgcgccaccctgctacccccttca

SEQ ID NO: 32332 - DNA, 47 bp, Emericella nidulans
gaattcactgcggccgccatggctctttttcaggtacgttggcctcc

SEQ ID NO: 32333 - DNA, 41 bp, Emericella nidulans
gttctcgagacgagcgatcgcctctccgcgtcgcatcctcc

SEQ ID NO: 32334 - DNA, 41 bp, Emericella nidulans
gaattcactgcggccgccatgtggtcgcaaggcccagaagg

SEQ ID NO: 32335 - DNA, 44 bp, Emericella nidulans
gttctcgagacgagcgatcgccacggagctgctgcttcttgagg

SEQ ID NO: 32336 - DNA, 54 bp, Emericella nidulans
gaattcactgcggccgccatgttatgtcattgtaattctggtttacaggcgttg

SEQ ID NO: 32337 - DNA, 44 bp, Emericella nidulans
gttctcgagacgagcgatcgcttggtcttccctttccacgcagt

SEQ ID NO: 32338 - DNA, 41 bp, Emericella nidulans
gaattcactgcggccgccatgtccaccctccgttgttccct

SEQ ID NO: 32339 - DNA, 45 bp, Emericella nidulans
gttctcgagacgagcgatcgcccatcccactcttcctcgtcatcc

SEQ ID NO: 32340 - DNA, 41 bp, Emericella nidulans
gaattcactgcggccgccatgccccaaacccatggcacgtc

SEQ ID NO: 32341 - DNA, 54 bp, Emericella nidulans
gttctcgagacgagcgatcgccggagtgagatgcaactaaccttgtataaaact

SEQ ID NO: 32342 - DNA, 51 bp, Emericella nidulans
gaattcactgcggccgccatgctatacgagtctggtctaacgattccctcc

SEQ ID NO: 32343 - DNA, 42 bp, Emericella nidulans
gttctcgagacgagcgatcgccccagcagctacaggccgaga

SEQ ID NO: 32344 - DNA, 40 bp, Emericella nidulans; identical to SEQ ID NO: 29208

SEQ ID NO: 32345 - DNA, 41 bp, Emericella nidulans
gttctcgagacgagcgatcgccgcaccaccctgctgctgac

SEQ ID NO: 32346 - DNA, 42 bp, Emericella nidulans
gaattcactgcggccgccatggcgactacctgcagcgcctgt

SEQ ID NO: 32347 - DNA, 41 bp, Emericella nidulans
gttctcgagacgagcgatcgctaggcgcatcgggcttctgc

SEQ ID NO: 32348 - DNA, 41 bp, Emericella nidulans
gaattcactgcggccgccatgggacccgtccgcctttttgg

SEQ ID NO: 32349 - DNA, 46 bp, Emericella nidulans
gttctcgagacgagcgatcgccttcgagtttcaattcgcggcaatg

SEQ ID NO: 32350 - DNA, 49 bp, Emericella nidulans
gaattcactgcggccgccatgtcaccctctacaaccaacaaatccaagc

SEQ ID NO: 32351 - DNA, 43 bp, Emericella nidulans
gttctcgagacgagcgatcgctcctttcccaacacctgcaccc

SEQ ID NO: 32352 - DNA, 41 bp, Emericella nidulans
gaattcactgcggccgccatgttcgagcagattgcccagca

SEQ ID NO: 32353 - DNA, 42 bp, Emericella nidulans
gttctcgagacgagcgatcgcgcccagttgttcccctgctca

SEQ ID NO: 32354 - DNA, 40 bp, Emericella nidulans
gaattcactgcggccgccatgcttcgccgccgacgaggct

SEQ ID NO: 32355 - DNA, 41 bp, Emericella nidulans
gttctcgagacgagcgatcgcggccagctcgagaccgatca

SEQ ID NO: 32356 - DNA, 43 bp, Emericella nidulans
gaattcactgcggccgccatgtgccgcaaattatccagcgact

SEQ ID NO: 32357 - DNA, 42 bp, Emericella nidulans
gttctcgagacgagcgatcgccaagcggcacgccgatagatg

SEQ ID NO: 32358 - DNA, 43 bp, Emericella nidulans
gaattcactgcggccgccatgtgttatttgcggcactggtacg

SEQ ID NO: 32359 - DNA, 40 bp, Emericella nidulans
gttctcgagacgagcgatcgcccggccgtcagggccaata

SEQ ID NO: 32360 - DNA, 47 bp, Emericella nidulans
gaattcactgcggccgccatgtgacatgcttggtatatagcggaggg

SEQ ID NO: 32361 - DNA, 43 bp, Emericella nidulans
gttctcgagacgagcgatcgctcccccatgcagcgtagaaacg

SEQ ID NO: 32362 - DNA, 41 bp, Emericella nidulans
gaattcactgcggccgccatgcaaggccacccgatgctcgt

SEQ ID NO: 32363 - DNA, 39 bp, Emericella nidulans
gttctcgagacgagcgatcgcgcgcccaccacgacctcc

SEQ ID NO: 32364 - DNA, 55 bp, Emericella nidulans
gaattcactgcggccgccatggtcttgatacaagtaatgaatgacgagttcgatg

SEQ ID NO: 32365 - DNA, 43 bp, Emericella nidulans
gttctcgagacgagcgatcgcccgcctcttcttcccaaccacc

SEQ ID NO: 32366 - DNA, 42 bp, Emericella nidulans
gaattcactgcggccgccatgtggcaaacgaatgcagggctc

SEQ ID NO: 32367 - DNA, 45 bp, Emericella nidulans
gttctcgagacgagcgatcgctgccgttggaattcttctgcttcg

SEQ ID NO: 32368 - DNA, 42 bp, Emericella nidulans
gaattcactgcggccgccatgccgaggacgtccagcaaacca

SEQ ID NO: 32369 - DNA, 41 bp, Emericella nidulans
gttctcgagacgagcgatcgcatcgcattcgccgcgacagt

SEQ ID NO: 32370 - DNA, 41 bp, Emericella nidulans
gaattcactgcggccgccatgccggtagaggaggcggtgcc

SEQ ID NO: 32371 - DNA, 54 bp, Emericella nidulans
gttctcgagacgagcgatcgcttgagcagtatttgacctgtatttaaggcacga

SEQ ID NO: 32372 - DNA, 41 bp, Emericella nidulans
gaattcactgcggccgccatgcccagtcaccggcccaaaaa

SEQ ID NO: 32373 - DNA, 41 bp, Emericella nidulans
gttctcgagacgagcgatcgcactcgcggcctcggcataca

SEQ ID NO: 32374 - DNA, 41 bp, Emericella nidulans
gaattcactgcggccgccatgtggcaactgctgctcgtcca

SEQ ID NO: 32375 - DNA, 41 bp, Emericella nidulans
gttctcgagacgagcgatcgcgggatcgccggttccagtca

SEQ ID NO: 32376 - DNA, 47 bp, Emericella nidulans
gaattcactgcggccgccatggcatcgatagatgaaatcggctcgaa

SEQ ID NO: 32377 - DNA, 41 bp, Emericella nidulans
gttctcgagacgagcgatcgcgtgaggcggcgtcgaagagc

SEQ ID NO: 32378 - DNA, 51 bp, Emericella nidulans
gaattcactgcggccgccatgcagaaatatcagaatcagggcgctgacagg

SEQ ID NO: 32379 - DNA, 43 bp, Emericella nidulans
gttctcgagacgagcgatcgccaaccatctcgggcttgacctc

SEQ ID NO: 32380 - DNA, 44 bp, Emericella nidulans
gaattcactgcggccgccatgccgcgaaacaaactccaccttca

SEQ ID NO: 32381 - DNA, 41 bp, Emericella nidulans
gttctcgagacgagcgatcgccaccaaggacgacgccgtga

SEQ ID NO: 32382 - DNA, 47 bp, Emericella nidulans
gaattcactgcggccgccatgcaagtacaggaattgctcaacatccc

SEQ ID NO: 32383 - DNA, 41 bp, Emericella nidulans
gttctcgagacgagcgatcgcgcgccaccgacaaggacatt

SEQ ID NO: 32384 - DNA, 41 bp, Emericella nidulans
gaattcactgcggccgccatgaggcccgacacgcatcctcc

SEQ ID NO: 32385 - DNA, 48 bp, Emericella nidulans
gttctcgagacgagcgatcgcgcgttgtagatcaaacggaagacatcg

SEQ ID NO: 32386 - DNA, 41 bp, Emericella nidulans
gaattcactgcggccgccatgggcggcaatgcgttgtcctt

SEQ ID NO: 32387 - DNA, 47 bp, Emericella nidulans
gttctcgagacgagcgatcgcccgagagtaatcgctcgaacttctcc

SEQ ID NO: 32388 - DNA, 43 bp, Emericella nidulans
gaattcactgcggccgccatgcactaaaagccaccgcccgtga

SEQ ID NO: 32389 - DNA, 41 bp, Emericella nidulans
gttctcgagacgagcgatcgccgcggcctcctcctccttct

SEQ ID NO: 32390 - DNA, 41 bp, Emericella nidulans
gaattcactgcggccgccatgggccgcctctcgtgtcttcg

SEQ ID NO: 32391 - DNA, 43 bp, Emericella nidulans
gttctcgagacgagcgatcgcgcttcgacgaaggcgaaaccaa

SEQ ID NO: 32392 - DNA, 50 bp, Emericella nidulans
gaattcactgcggccgccatgccattattctctttgaagcatgtcgcatc

SEQ ID NO: 32393 - DNA, 41 bp, Emericella nidulans
gttctcgagacgagcgatcgctggccggtcgaggtggtgat

SEQ ID NO: 32394 - DNA, 41 bp, Emericella nidulans
gaattcactgcggccgccatgccgccagacttccggcacat

SEQ ID NO: 32395 - DNA, 41 bp, Emericella nidulans
gttctcgagacgagcgatcgccgcactgctcccgtccaacc

SEQ ID NO: 32396 - DNA, 41 bp, Emericella nidulans
gaattcactgcggccgccatgttcatcggcggcacagaccc

SEQ ID NO: 32397 - DNA, 41 bp, Emericella nidulans
gttctcgagacgagcgatcgcattcgcacgatcccccacca

SEQ ID NO: 32398 - DNA, 41 bp, Emericella nidulans
gaattcactgcggccgccatgtgcagaggagggctgggaaa

SEQ ID NO: 32399 - DNA, 47 bp, Emericella nidulans
gttctcgagacgagcgatcgccccaaataccttgtcataccccgtca

SEQ ID NO: 32400 - DNA, 50 bp, Emericella nidulans
gaattcactgcggccgccatgtgacatgtacgcacacctaaacaacactg

SEQ ID NO: 32401 - DNA, 42 bp, Emericella nidulans
gttctcgagacgagcgatcgccccaacgcctcccgaattcct

SEQ ID NO: 32402 - DNA, 53 bp, Emericella nidulans
gaattcactgcggccgccatggacccacaatctcagatatagcctgacgcaaa

SEQ ID NO: 32403 - DNA, 50 bp, Emericella nidulans
gttctcgagacgagcgatcgcctttgcaagggtagtggatatctctgtga

SEQ ID NO: 32404 - DNA, 48 bp, Emericella nidulans
gaattcactgcggccgccatggcctctaggttccatattggaagtggg

SEQ ID NO: 32405 - DNA, 41 bp, Emericella nidulans
gttctcgagacgagcgatcgcggatgacgctgtcgcctcgt

SEQ ID NO: 32406 - DNA, 53 bp, Emericella nidulans
gaattcactgcggccgccatgcaaatagtttcaacaatgtctgatccatctgc

SEQ ID NO: 32407 - DNA, 41 bp, Emericella nidulans
gttctcgagacgagcgatcgcccaccgccgatttgctcctg

SEQ ID NO: 32408 - DNA, 42 bp, Emericella nidulans
gaattcactgcggccgccatggcggtcaaagcctgcaaggga

SEQ ID NO: 32409 - DNA, 42 bp, Emericella nidulans
gttctcgagacgagcgatcgctggcgattccctctttgacca

SEQ ID NO: 32410 - DNA, 54 bp, Emericella nidulans
gaattcactgcggccgccatgatataagctgctgttggaaatgtatcaggagga

SEQ ID NO: 32411 - DNA, 46 bp, Emericella nidulans
gttctcgagacgagcgatcgctatctgagatgatgggcacggaagc

SEQ ID NO: 32412 - DNA, 41 bp, Emericella nidulans
gaattcactgcggccgccatgtgcgtgctgtgatggctgct

SEQ ID NO: 32413 - DNA, 57 bp, Emericella nidulans
gttctcgagacgagcgatcgcccaggtgggcaatgtagtcactacatagtgggttag

SEQ ID NO: 32414 - DNA, 49 bp, Emericella nidulans
gaattcactgcggccgccatgcgtgaattgttagagcttaaggcgaagc

SEQ ID NO: 32415 - DNA, 45 bp, Emericella nidulans
gttctcgagacgagcgatcgccgatcaacattccgcaaagaccgt

SEQ ID NO: 32416 - DNA, 42 bp, Emericella nidulans
gaattcactgcggccgccatgcgaccagctctctcggcctcc

SEQ ID NO: 32417 - DNA, 49 bp, Emericella nidulans
gttctcgagacgagcgatcgcgcccaagaattcaagtaaaaaggcagga

SEQ ID NO: 32418 - DNA, 41 bp, Emericella nidulans
gaattcactgcggccgccatgcctcgcgagcggtgagaaca

SEQ ID NO: 32419 - DNA, 44 bp, Emericella nidulans
gttctcgagacgagcgatcgcgctcgttgcatgcggtaatgaca

SEQ ID NO: 32420 - DNA, 43 bp, Emericella nidulans
gaattcactgcggccgccatgcgacagttccttgccgtcatcg

SEQ ID NO: 32421 - DNA, 50 bp, Emericella nidulans
gttctcgagacgagcgatcgcgcgatctgtgctggtagttagtatattgc

SEQ ID NO: 32422 - DNA, 50 bp, Emericella nidulans
gaattcactgcggccgccatgatgaaatccatcgctcttacctctctttc

SEQ ID NO: 32423 - DNA, 45 bp, Emericella nidulans
gttctcgagacgagcgatcgcccccgttgtacacggtctcacagg

SEQ ID NO: 32424 - DNA, 44 bp, Emericella nidulans
gaattcactgcggccgccatgggcagcttctatagcgcccgagt

SEQ ID NO: 32425 - DNA, 42 bp, Emericella nidulans
gttctcgagacgagcgatcgccggtgtgttcttccgcgcttc

SEQ ID NO: 32426 - DNA, 42 bp, Emericella nidulans
gaattcactgcggccgccatgcctttgccttcggggttgagc

SEQ ID NO: 32427 - DNA, 42 bp, Emericella nidulans
gttctcgagacgagcgatcgccggaggccttctcacggaagc

SEQ ID NO: 32428 - DNA, 44 bp, Emericella nidulans
gaattcactgcggccgccatgtcgctacaccgtccgtaccttcg

SEQ ID NO: 32429 - DNA, 47 bp, Emericella nidulans
gttctcgagacgagcgatcgcgcatagtctcggtctggttgatacgg

SEQ ID NO: 32430 - DNA, 41 bp, Emericella nidulans
gaattcactgcggccgccatgaaaagtggcggtgccggtgg

SEQ ID NO: 32431 - DNA, 41 bp, Emericella nidulans
gttctcgagacgagcgatcgctcgctaccatcggcgggaga

SEQ ID NO: 32432 - DNA, 41 bp, Emericella nidulans
gaattcactgcggccgccatgggcccagcgaaccgcctaac

SEQ ID NO: 32433 - DNA, 42 bp, Emericella nidulans
gttctcgagacgagcgatcgccccagggttctcaagggccac

SEQ ID NO: 32434 - DNA, 43 bp, Emericella nidulans
gaattcactgcggccgccatggggacgtcaacatggagcgaca

SEQ ID NO: 32435 - DNA, 43 bp, Emericella nidulans
gttctcgagacgagcgatcgctcctcaaacggatgccagctca

SEQ ID NO: 32436 - DNA, 46 bp, Emericella nidulans
gaattcactgcggccgccatgtgacaattctacagcctggcccatc

SEQ ID NO: 32437 - DNA, 39 bp, Emericella nidulans
gttctcgagacgagcgatcgcgcgcggatctggggcatc

SEQ ID NO: 32438 - DNA, 41 bp, Emericella nidulans
gaattcactgcggccgccatgcctggtccgggccgctaaaa

SEQ ID NO: 32439 - DNA, 45 bp, Emericella nidulans
gttctcgagacgagcgatcgctgctgcccatgatagtggtgttcg

SEQ ID NO: 32440 - DNA, 41 bp, Emericella nidulans
gaattcactgcggccgccatgtccgcggctttcgacgtgat

SEQ ID NO: 32441 - DNA, 43 bp, Emericella nidulans
gttctcgagacgagcgatcgcggccttcttcaaaacgggctcc

SEQ ID NO: 32442 - DNA, 41 bp, Emericella nidulans
gaattcactgcggccgccatgatcacccgtggccgttacgc

SEQ ID NO: 32443 - DNA, 44 bp, Emericella nidulans
gttctcgagacgagcgatcgcgagagtgtaacgggtgggcatca

SEQ ID NO: 32444 - DNA, 41 bp, Emericella nidulans
gaattcactgcggccgccatggcaggccaagaggccgtcaa

SEQ ID NO: 32445 - DNA, 41 bp, Emericella nidulans
gttctcgagacgagcgatcgcgagttccgccgcatcctcgt

SEQ ID NO: 32446 - DNA, 44 bp, Emericella nidulans
gaattcactgcggccgccatgcaacgccatttccagcactgttc

SEQ ID NO: 32447 - DNA, 41 bp, Emericella nidulans
gttctcgagacgagcgatcgccgccttcttcgccagctcca

SEQ ID NO: 32448 - DNA, 41 bp, Emericella nidulans
gaattcactgcggccgccatggcaaaggtcaaggcccagca

SEQ ID NO: 32449 - DNA, 41 bp, Emericella nidulans
gttctcgagacgagcgatcgcgcgcgggcagatccttcttg

SEQ ID NO: 32450 - DNA, 40 bp, Emericella nidulans
gaattcactgcggccgccatggcgatccgaaacggtgctc

SEQ ID NO: 32451 - DNA, 42 bp, Emericella nidulans
gttctcgagacgagcgatcgcgcaagcggctagggcttcgac

SEQ ID NO: 32452 - DNA, 42 bp, Emericella nidulans
gaattcactgcggccgccatgtcacaaaccaaggcggcttcc

SEQ ID NO: 32453 - DNA, 51 bp, Emericella nidulans
gttctcgagacgagcgatcgcttgaccggtttacgagagaaaacatacaca

SEQ ID NO: 32454 - DNA, 43 bp, Emericella nidulans
gaattcactgcggccgccatgcagggaccggtacctgaggaca

SEQ ID NO: 32455 - DNA, 46 bp, Emericella nidulans
gttctcgagacgagcgatcgccgcactataccttgcaaacggactc

SEQ ID NO: 32456 - DNA, 41 bp, Emericella nidulans
gaattcactgcggccgccatgcgacaagcccgcgacgaagt

SEQ ID NO: 32457 - DNA, 42 bp, Emericella nidulans
gttctcgagacgagcgatcgcgcgctgccatggacaggctta

SEQ ID NO: 32458 - DNA, 50 bp, Emericella nidulans
gaattcactgcggccgccatgcatcaaacacataaaagcggatttgctga

SEQ ID NO: 32459 - DNA, 41 bp, Emericella nidulans
gttctcgagacgagcgatcgcctcaccccggtagccaacga

SEQ ID NO: 32460 - DNA, 41 bp, Emericella nidulans
gaattcactgcggccgccatgcggcgggattgatgcgttct

SEQ ID NO: 32461 - DNA, 49 bp, Emericella nidulans
gttctcgagacgagcgatcgcctaactatccgccaaaagatccccgttc

SEQ ID NO: 32462 - DNA, 42 bp, Emericella nidulans
gaattcactgcggccgccatgggaagcgttcctgcgggagat

SEQ ID NO: 32463 - DNA, 41 bp, Emericella nidulans
gttctcgagacgagcgatcgccccgagcagccttctggagc

SEQ ID NO: 32464 - DNA, 42 bp, Emericella nidulans
gaattcactgcggccgccatgtcgacctcctccgcctgttcc

SEQ ID NO: 32465 - DNA, 40 bp, Emericella nidulans
gttctcgagacgagcgatcgcgcgccctgggcgcatctat

SEQ ID NO: 32466 - DNA, 42 bp, Emericella nidulans
gaattcactgcggccgccatgcgcccaaactcccaaatcctc

SEQ ID NO: 32467 - DNA, 42 bp, Emericella nidulans
gttctcgagacgagcgatcgccccccagccccctatcaaacc

SEQ ID NO: 32468 - DNA, 43 bp, Emericella nidulans
gaattcactgcggccgccatggcggtgggaatagtatcgaccc

SEQ ID NO: 32469 - DNA, 43 bp, Emericella nidulans
gttctcgagacgagcgatcgctctcctctcgcaccgtcaggaa

SEQ ID NO: 32470 - DNA, 42 bp, Emericella nidulans
gaattcactgcggccgccatggctcactgtctccccggctga

SEQ ID NO: 32471 - DNA, 41 bp, Emericella nidulans
gttctcgagacgagcgatcgccccgaacctccgcggatagc

SEQ ID NO: 32472 - DNA, 41 bp, Emericella nidulans
gaattcactgcggccgccatggcgagagagctgcggcacaa

SEQ ID NO: 32473 - DNA, 43 bp, Emericella nidulans
gttctcgagacgagcgatcgcttcgctgagcactcgtgaatgg

SEQ ID NO: 32474 - DNA, 41 bp, Emericella nidulans
gaattcactgcggccgccatgcaagcggatccgacgtttgg

SEQ ID NO: 32475 - DNA, 49 bp, Emericella nidulans
gttctcgagacgagcgatcgctttttgatcccaagttttatccaaagca

SEQ ID NO: 32476 - DNA, 41 bp, Emericella nidulans
gaattcactgcggccgccatggtccttggccgcaccggtat

SEQ ID NO: 32477 - DNA, 41 bp, Emericella nidulans
gttctcgagacgagcgatcgccgggcctcacgttcggactc

SEQ ID NO: 32478 - DNA, 44 bp, Emericella nidulans
gaattcactgcggccgccatgtgacgccttccgtctcattcagc

SEQ ID NO: 32479 - DNA, 49 bp, Emericella nidulans
gttctcgagacgagcgatcgcacgcatttgttaagaaaccgtcctgaca

SEQ ID NO: 32480 - DNA, 41 bp, Emericella nidulans
gaattcactgcggccgccatgacggggacactcgagcagca

SEQ ID NO: 32481 - DNA, 42 bp, Emericella nidulans
gttctcgagacgagcgatcgcggcagagcgcttatgggggag

SEQ ID NO: 32482 - DNA, 49 bp, Emericella nidulans
gaattcactgcggccgccatgggcattcatgcatcagatacaagaggtt

SEQ ID NO: 32483 - DNA, 41 bp, Emericella nidulans
gttctcgagacgagcgatcgcgccctgacccggtggaaggt

SEQ ID NO: 32484 - DNA, 41 bp, Emericella nidulans
gaattcactgcggccgccatggcccaccgcatcgtaaccca

SEQ ID NO: 32485 - DNA, 44 bp, Emericella nidulans
gttctcgagacgagcgatcgcccaacccattccatcaccaaagc

SEQ ID NO: 32486 - DNA, 41 bp, Emericella nidulans
gaattcactgcggccgccatgtcccaagtggcttgctttgg

SEQ ID NO: 32487 - DNA, 57 bp, Emericella nidulans
gttctcgagacgagcgatcgcagtttacaatccaagataggcatctctctgggtcaa

SEQ ID NO: 32488 - DNA, 43 bp, Emericella nidulans
gaattcactgcggccgccatgcgctgggatccttcgtttgtcg

SEQ ID NO: 32489 - DNA, 52 bp, Emericella nidulans
gttctcgagacgagcgatcgcgcaggagtttctgagcataatagcataagca

SEQ ID NO: 32490 - DNA, 41 bp, Emericella nidulans
gaattcactgcggccgccatggctcgccacttcgcggagac

SEQ ID NO: 32491 - DNA, 41 bp, Emericella nidulans
gttctcgagacgagcgatcgccacgctgccgccagagttca

SEQ ID NO: 32492 - DNA, 45 bp, Emericella nidulans
gaattcactgcggccgccatggctctcaagagtgctttgcagtca

SEQ ID NO: 32493 - DNA, 56 bp, Emericella nidulans
gttctcgagacgagcgatcgcaaaaatcatatgttgcaaccaatgaggttgattac

SEQ ID NO: 32494 - DNA, 42 bp, Emericella nidulans
gaattcactgcggccgccatgctcgccatccacaacgccctc

SEQ ID NO: 32495 - DNA, 43 bp, Emericella nidulans
gttctcgagacgagcgatcgccctggacacgcttgctcatggt

SEQ ID NO: 32496 - DNA, 41 bp, Emericella nidulans
gaattcactgcggccgccatggcgccggcaacaacaactcc

SEQ ID NO: 32497 - DNA, 48 bp, Emericella nidulans
gttctcgagacgagcgatcgcgaacgagtagactcaccagagcagtcc

SEQ ID NO: 32498 - DNA, 43 bp, Emericella nidulans
gaattcactgcggccgccatgccttgaccgtttcccacctccc

SEQ ID NO: 32499 - DNA, 41 bp, Emericella nidulans
gttctcgagacgagcgatcgctgctgccgctgctgcttctc

SEQ ID NO: 32500 - DNA, 41 bp, Emericella nidulans
gaattcactgcggccgccatgagcgcgctgcccctatgcag

SEQ ID NO: 32501 - DNA, 41 bp, Emericella nidulans
gttctcgagacgagcgatcgcttgcgtggggaggtggaagc

SEQ ID NO: 32502 - DNA, 45 bp, Emericella nidulans
gaattcactgcggccgccatggcggctcgagagttgtgaatagca

SEQ ID NO: 32503 - DNA, 41 bp, Emericella nidulans
gttctcgagacgagcgatcgcgagcaaagccaccacctgga

SEQ ID NO: 32504 - DNA, 44 bp, Emericella nidulans
gaattcactgcggccgccatgcaacccctccctctcctccttca

SEQ ID NO: 32505 - DNA, 44 bp, Emericella nidulans
gttctcgagacgagcgatcgcggtggtggtgggaaggactcacg

SEQ ID NO: 32506 - DNA, 42 bp, Emericella nidulans
gaattcactgcggccgccatgcccttcatcagcggcgaggag

SEQ ID NO: 32507 - DNA, 42 bp, Emericella nidulans
gttctcgagacgagcgatcgcgatccagcagccccgatgaca

SEQ ID NO: 32508 - DNA, 41 bp, Emericella nidulans
gaattcactgcggccgccatggcagtgaccgcacgcaaacg

SEQ ID NO: 32509 - DNA, 56 bp, Emericella nidulans
gttctcgagacgagcgatcgcatcaggtagtcaagcttacattgacaagcgtatcc

SEQ ID NO: 32510 - DNA, 50 bp, Emericella nidulans
gaattcactgcggccgccatgttcaatccctttgtcacagcttgtacacc

SEQ ID NO: 32511 - DNA, 55 bp, Emericella nidulans
gttctcgagacgagcgatcgcatatttaggacagctggttctcttatgcccctga

SEQ ID NO: 32512 - DNA, 50 bp, Emericella nidulans
gaattcactgcggccgccatgagcacaataatgttcaagccttcatcacc

SEQ ID NO: 32513 - DNA, 43 bp, Emericella nidulans
gttctcgagacgagcgatcgctttcctggagcaggccagcgta

SEQ ID NO: 32514 - DNA, 43 bp, Emericella nidulans
gaattcactgcggccgccatgcgccgtcaacctgttcttgcag

SEQ ID NO: 32515 - DNA, 42 bp, Emericella nidulans
gttctcgagacgagcgatcgcgcggaagatctcggtcgcatc

SEQ ID NO: 32516 - DNA, 46 bp, Emericella nidulans
gaattcactgcggccgccatgtgactccgaggctgaagatcacaca

SEQ ID NO: 32517 - DNA, 41 bp, Emericella nidulans
gttctcgagacgagcgatcgccgcctgcatcacccatgtcc

SEQ ID NO: 32518 - DNA, 42 bp, Emericella nidulans
gaattcactgcggccgccatgagccatggggttgcttcaatc

SEQ ID NO: 32519 - DNA, 43 bp, Emericella nidulans
gttctcgagacgagcgatcgcgctggtcctcttgtggccctga

SEQ ID NO: 32520 - DNA, 43 bp, Emericella nidulans
gaattcactgcggccgccatgagctgccccaggagatccgttc

SEQ ID NO: 32521 - DNA, 42 bp, Emericella nidulans
gttctcgagacgagcgatcgccctcgccaatcagtgccgcta

SEQ ID NO: 32522 - DNA, 41 bp, Emericella nidulans
gaattcactgcggccgccatggggcgatcaccctcgctcac

SEQ ID NO: 32523 - DNA, 44 bp, Emericella nidulans
gttctcgagacgagcgatcgccgctcgcatatgtggcatctctg

SEQ ID NO: 32524 - DNA, 41 bp, Emericella nidulans
gaattcactgcggccgccatgactggaggggcacggggact

SEQ ID NO: 32525 - DNA, 41 bp, Emericella nidulans
gttctcgagacgagcgatcgctgagccggggcattttcgag

SEQ ID NO: 32526 - DNA, 43 bp, Emericella nidulans
gaattcactgcggccgccatggggttcgcaattctggggcttc

SEQ ID NO: 32527 - DNA, 45 bp, Emericella nidulans
gttctcgagacgagcgatcgcccgttagggtttgtctggggaaca

SEQ ID NO: 32528 - DNA, 48 bp, Emericella nidulans
gaattcactgcggccgccatgtgaagaaattcatcaggatggctcacg

SEQ ID NO: 32529 - DNA, 41 bp, Emericella nidulans
gttctcgagacgagcgatcgccgaggctgccctggagttgg

SEQ ID NO: 32530 - DNA, 41 bp, Emericella nidulans
gaattcactgcggccgccatgaacaaacccgcggggcattc

SEQ ID NO: 32531 - DNA, 51 bp, Emericella nidulans
gttctcgagacgagcgatcgcctccctcagaaactctaaatcttcatcaca

SEQ ID NO: 32532 - DNA, 50 bp, Emericella nidulans
gaattcactgcggccgccatgatcagcagaacaagatcgataccagcgta

SEQ ID NO: 32533 - DNA, 41 bp, Emericella nidulans
gttctcgagacgagcgatcgccccggatggctgctgatgct

SEQ ID NO: 32534 - DNA, 40 bp, Emericella nidulans
gaattcactgcggccgccatgggccgcaaaatggccgact

SEQ ID NO: 32535 - DNA, 46 bp, Emericella nidulans
gttctcgagacgagcgatcgccgtcttatacccttcctgcgggtcc

SEQ ID NO: 32536 - DNA, 52 bp, Emericella nidulans
gaattcactgcggccgccatgtatgttttcctctgtgtactacaacgccagt

SEQ ID NO: 32537 - DNA, 41 bp, Emericella nidulans
gttctcgagacgagcgatcgccgggtcgaagcaaggctgga

SEQ ID NO: 32538 - DNA, 50 bp, Emericella nidulans
gaattcactgcggccgccatgaagcgtactacgaactctaccggggaagc

SEQ ID NO: 32539 - DNA, 41 bp, Emericella nidulans
gttctcgagacgagcgatcgctccgcgctgatggtttgctg

SEQ ID NO: 32540 - DNA, 42 bp, Emericella nidulans
gaattcactgcggccgccatggccgcatgatcaacagccaca

SEQ ID NO: 32541 - DNA, 52 bp, Emericella nidulans
gttctcgagacgagcgatcgcccgagtaatgagcgcactcttcatccgaatc

SEQ ID NO: 32542 - DNA, 46 bp, Emericella nidulans
gaattcactgcggccgccatggcagatcttcgtcaaaaccctcacg

SEQ ID NO: 32543 - DNA, 54 bp, Emericella nidulans
gttctcgagacgagcgatcgcatgtactgtagacagattgcatacctcgggaga

SEQ ID NO: 32544 - DNA, 43 bp, Emericella nidulans
gaattcactgcggccgccatgggagggctacaagggctccacc

SEQ ID NO: 32545 - DNA, 41 bp, Emericella nidulans
gttctcgagacgagcgatcgcggggagcaccggactggcta

SEQ ID NO: 32546 - DNA, 41 bp, Emericella nidulans
gaattcactgcggccgccatgtctcttggccgtcgccgttc

SEQ ID NO: 32547 - DNA, 43 bp, Emericella nidulans
gttctcgagacgagcgatcgctccgggacgaagaaccaaacga

SEQ ID NO: 32548 - DNA, 49 bp, Emericella nidulans
gaattcactgcggccgccatgaagaaagctatcgccaaagaccagatcg

SEQ ID NO: 32549 - DNA, 42 bp, Emericella nidulans
gttctcgagacgagcgatcgccctccaagctcaaccccgaca

SEQ ID NO: 32550 - DNA, 41 bp, Emericella nidulans
gaattcactgcggccgccatgagcgacgcaagcctcggatg

SEQ ID NO: 32551 - DNA, 44 bp, Emericella nidulans
gttctcgagacgagcgatcgcctcctcctttctatccgcctgtg

SEQ ID NO: 32552 - DNA, 43 bp, Emericella nidulans
gaattcactgcggccgccatgccctctccggagcattgagagc

SEQ ID NO: 32553 - DNA, 42 bp, Emericella nidulans
gttctcgagacgagcgatcgcgcctccgtggtaaggcgacca

SEQ ID NO: 32554 - DNA, 41 bp, Emericella nidulans
gaattcactgcggccgccatggctcaccgcccctcaccaac

SEQ ID NO: 32555 - DNA, 41 bp, Emericella nidulans
gttctcgagacgagcgatcgcggctgccgacttgccctcag

SEQ ID NO: 32556 - DNA, 42 bp, Emericella nidulans
gaattcactgcggccgccatgcatcaagcgcaccggtcttgg

SEQ ID NO: 32557 - DNA, 44 bp, Emericella nidulans
gttctcgagacgagcgatcgctcctccatctgcagcgtcaaacc

SEQ ID NO: 32558 - DNA, 44 bp, Emericella nidulans
gaattcactgcggccgccatgcggaaaggtcgtttcctgggtca

SEQ ID NO: 32559 - DNA, 42 bp, Emericella nidulans
gttctcgagacgagcgatcgctctcgccgggagaaatcgtga

SEQ ID NO: 32560 - DNA, 41 bp, Emericella nidulans
gaattcactgcggccgccatgccgtcgtgctccccagcatt

SEQ ID NO: 32561 - DNA, 41 bp, Emericella nidulans
gttctcgagacgagcgatcgcgaccgccctcccgcatcttt

SEQ ID NO: 32562 - DNA, 46 bp, Emericella nidulans
gaattcactgcggccgccatgtgattgacaagtgcgttggatctcg

SEQ ID NO: 32563 - DNA, 41 bp, Emericella nidulans
gttctcgagacgagcgatcgccaggcccttcaccaccagga

SEQ ID NO: 32564 - DNA, 57 bp, Emericella nidulans
gaattcactgcggccgccatggatacctggcaactaccgtatagctttatcgcctga

SEQ ID NO: 32565 - DNA, 41 bp, Emericella nidulans
gttctcgagacgagcgatcgcttttgcagcggccccagaag

SEQ ID NO: 32566 - DNA, 42 bp, Emericella nidulans
gaattcactgcggccgccatgcgtctccggccacaagtacgg

SEQ ID NO: 32567 - DNA, 41 bp, Emericella nidulans
gttctcgagacgagcgatcgccgtaccacgacgcgcatcaa

SEQ ID NO: 32568 - DNA, 41 bp, Emericella nidulans
gaattcactgcggccgccatgcccaaccgacctccccatcc

SEQ ID NO: 32569 - DNA, 42 bp, Emericella nidulans
gttctcgagacgagcgatcgctccgaccgattcaacccctca

SEQ ID NO: 32570 - DNA, 42 bp, Emericella nidulans
gaattcactgcggccgccatgcgctggacaaagcagcacggt

SEQ ID NO: 32571 - DNA, 47 bp, Emericella nidulans
gttctcgagacgagcgatcgcgcgtaaagtcgtttccaacaaatgtc

SEQ ID NO: 32572 - DNA, 46 bp, Emericella nidulans
gaattcactgcggccgccatgatgctttgctggacatcatcctaaa

SEQ ID NO: 32573 - DNA, 47 bp, Emericella nidulans
gttctcgagacgagcgatcgccgactctgtcctgatatcgctctcca

SEQ ID NO: 32574 - DNA, 41 bp, Emericella nidulans
gaattcactgcggccgccatgcgagcgtgtcctcccttcca

SEQ ID NO: 32575 - DNA, 41 bp, Emericella nidulans
gttctcgagacgagcgatcgctcccgccatccttgccttca

SEQ ID NO: 32576 - DNA, 41 bp, Emericella nidulans
gaattcactgcggccgccatgtccccctcgcctccgttagc

SEQ ID NO: 32577 - DNA, 41 bp, Emericella nidulans
gttctcgagacgagcgatcgccgtccccaaacgcctcatcc

SEQ ID NO: 32578 - DNA, 53 bp, Emericella nidulans
gaattcactgcggccgccatgcgttgacttgtacgagtctatattcggcgttt

SEQ ID NO: 32579 - DNA, 47 bp, Emericella nidulans
gttctcgagacgagcgatcgcctgcgtctccccatacttcttcatcc

SEQ ID NO: 32580 - DNA, 41 bp, Emericella nidulans
gaattcactgcggccgccatggcacttcaacgccccctcca

SEQ ID NO: 32581 - DNA, 44 bp, Emericella nidulans
gttctcgagacgagcgatcgcatgcgctccagaatctgctcacg

SEQ ID NO: 32582 - DNA, 41 bp, Emericella nidulans
gaattcactgcggccgccatgtcggggccctgatgaagctc

SEQ ID NO: 32583 - DNA, 44 bp, Emericella nidulans
gttctcgagacgagcgatcgcgctgtgcctgctccatactgtgc

SEQ ID NO: 32584 - DNA, 43 bp, Emericella nidulans
gaattcactgcggccgccatgtgtccattcaaggccccgactt

SEQ ID NO: 32585 - DNA, 44 bp, Emericella nidulans
gttctcgagacgagcgatcgcccacgcgttctagtcgtcggtca

SEQ ID NO: 32586 - DNA, 41 bp, Emericella nidulans
gaattcactgcggccgccatgggcgtcggtgcgattgtctg

SEQ ID NO: 32587 - DNA, 42 bp, Emericella nidulans
gttctcgagacgagcgatcgctggccctactgtacccgacca

SEQ ID NO: 32588 - DNA, 42 bp, Emericella nidulans
gaattcactgcggccgccatgtcgccaatacctgtccgacga

SEQ ID NO: 32589 - DNA, 41 bp, Emericella nidulans
gttctcgagacgagcgatcgctggggtcgtggtcaaggagc

SEQ ID NO: 32590 - DNA, 44 bp, Emericella nidulans
gaattcactgcggccgccatggatgcgaaggaaccgactggacc

SEQ ID NO: 32591 - DNA, 57 bp, Emericella nidulans
gttctcgagacgagcgatcgctttcataactagtcgactagataaatactcccatcc

SEQ ID NO: 32592 - DNA, 41 bp, Emericella nidulans
gaattcactgcggccgccatgacggcgcatggccaggtaga

SEQ ID NO: 32593 - DNA, 41 bp, Emericella nidulans
gttctcgagacgagcgatcgctgccacacgtgtcgctcgat

SEQ ID NO: 32594 - DNA, 41 bp, Emericella nidulans
gaattcactgcggccgccatgggcaacgacccagctgctca

SEQ ID NO: 32595 - DNA, 45 bp, Emericella nidulans
gttctcgagacgagcgatcgcttcgttggtgtcgtcagatattcg

SEQ ID NO: 32596 - DNA, 42 bp, Emericella nidulans
gaattcactgcggccgccatgtcccctacacccttgcggtca

SEQ ID NO: 32597 - DNA, 56 bp, Emericella nidulans
gttctcgagacgagcgatcgctccaaaagcatgtactactcaactaatttgaccct

SEQ ID NO: 32598 - DNA, 41 bp, Emericella nidulans
gaattcactgcggccgccatgcgtttccgcgcagacagcag

SEQ ID NO: 32599 - DNA, 44 bp, Emericella nidulans
gttctcgagacgagcgatcgctcgagtaaggtcaagtgcgagga

SEQ ID NO: 32600 - DNA, 41 bp, Emericella nidulans
gaattcactgcggccgccatgacattctgtggcgcccaccc

SEQ ID NO: 32601 - DNA, 41 bp, Emericella nidulans
gttctcgagacgagcgatcgccgggcccgttcctcttctgc

SEQ ID NO: 32602 - DNA, 44 bp, Emericella nidulans
gaattcactgcggccgccatggggccccaaggtatgtcttctgc

SEQ ID NO: 32603 - DNA, 41 bp, Emericella nidulans
gttctcgagacgagcgatcgccgacgtcgtgggcaatcagg

SEQ ID NO: 32604 - DNA, 42 bp, Emericella nidulans
gaattcactgcggccgccatgtctcgccaaggtctccgacga

SEQ ID NO: 32605 - DNA, 46 bp, Emericella nidulans
gttctcgagacgagcgatcgctattggtgtttatgcgggtgattgg

SEQ ID NO: 32606 - DNA, 53 bp, Emericella nidulans
gaattcactgcggccgccatgctgattcagactcagactcttcgtcaagttcc

SEQ ID NO: 32607 - DNA, 43 bp, Emericella nidulans
gttctcgagacgagcgatcgcgggagttcgctgagagcggcta

SEQ ID NO: 32608 - DNA, 41 bp, Emericella nidulans
gaattcactgcggccgccatgccctcgcggctacagcaacc

SEQ ID NO: 32609 - DNA, 41 bp, Emericella nidulans
gttctcgagacgagcgatcgctcagccggacctgtgcgttc

SEQ ID NO: 32610 - DNA, 55 bp, Emericella nidulans
gaattcactgcggccgccatggttgttgataaggagggctcgcctaggtggagta

SEQ ID NO: 32611 - DNA, 42 bp, Emericella nidulans
gttctcgagacgagcgatcgctcgcacttgctccaatcttgc

SEQ ID NO: 32612 - DNA, 40 bp, Emericella nidulans
gaattcactgcggccgccatgcgaaggggagccgggaacc

SEQ ID NO: 32613 - DNA, 47 bp, Emericella nidulans
gttctcgagacgagcgatcgcgccagtaccacgctggtattctttga

SEQ ID NO: 32614 - DNA, 43 bp, Emericella nidulans
gaattcactgcggccgccatgtggggacaaggtgtgacccgta

SEQ ID NO: 32615 - DNA, 42 bp, Emericella nidulans
gttctcgagacgagcgatcgctcatgccatgcattccggtgt

SEQ ID NO: 32616 - DNA, 44 bp, Emericella nidulans
gaattcactgcggccgccatgccttgccatcatcctctcgacaa

SEQ ID NO: 32617 - DNA, 49 bp, Emericella nidulans
gttctcgagacgagcgatcgcttgcaaatttcatcatatgcagaatccc

SEQ ID NO: 32618 - DNA, 42 bp, Emericella nidulans
gaattcactgcggccgccatgccagccatcaagcgcatcaca

SEQ ID NO: 32619 - DNA, 47 bp, Emericella nidulans
gttctcgagacgagcgatcgccagccttctggaattcaaccagttcc

SEQ ID NO: 32620 - DNA, 47 bp, Emericella nidulans
gaattcactgcggccgccatggcacctgtcgactacagttcgcttga

SEQ ID NO: 32621 - DNA, 41 bp, Emericella nidulans
gttctcgagacgagcgatcgctgatccccagccgaccttcc

SEQ ID NO: 32622 - DNA, 43 bp, Emericella nidulans
gaattcactgcggccgccatggggcaaggggcccctaatcagt

SEQ ID NO: 32623 - DNA, 41 bp, Emericella nidulans
gttctcgagacgagcgatcgccggcctctccagtgccttgc

SEQ ID NO: 32624 - DNA, 44 bp, Emericella nidulans
gaattcactgcggccgccatgccagaccttccgatcccgatctc

SEQ ID NO: 32625 - DNA, 41 bp, Emericella nidulans
gttctcgagacgagcgatcgcggctgggcatcgtcaaagaa

SEQ ID NO: 32626 - DNA, 41 bp, Emericella nidulans
gaattcactgcggccgccatgttcgccgacgacgccttcat

SEQ ID NO: 32627 - DNA, 43 bp, Emericella nidulans
gttctcgagacgagcgatcgccaggtaggtccaccggcaatgg

SEQ ID NO: 32628 - DNA, 44 bp, Emericella nidulans
gaattcactgcggccgccatgcccttcgtcgggattcagattgc

SEQ ID NO: 32629 - DNA, 44 bp, Emericella nidulans
gttctcgagacgagcgatcgctcgaaccacttctccgcctttcc

SEQ ID NO: 32630 - DNA, 41 bp, Emericella nidulans
gaattcactgcggccgccatgcactgcccgcccttcagcat

SEQ ID NO: 32631 - DNA, 41 bp, Emericella nidulans
gttctcgagacgagcgatcgcccaggcaaatcggttcccac

SEQ ID NO: 32632 - DNA, 40 bp, Emericella nidulans
gaattcactgcggccgccatgcgtctgcgcgtacggtccc

SEQ ID NO: 32633 - DNA, 56 bp, Emericella nidulans
gttctcgagacgagcgatcgcttgttcatctatcttcatcaaattttaaaaggctc

SEQ ID NO: 32634 - DNA, 41 bp, Emericella nidulans
gaattcactgcggccgccatgcggtaagcgacagcgccttg

SEQ ID NO: 32635 - DNA, 44 bp, Emericella nidulans
gttctcgagacgagcgatcgcggcttgtcctgagtgtgcaggga

SEQ ID NO: 32636 - DNA, 41 bp, Emericella nidulans
gaattcactgcggccgccatgcctcactggcaccggcgata

SEQ ID NO: 32637 - DNA, 41 bp, Emericella nidulans
gttctcgagacgagcgatcgccgccatgagcgcctccagtt

SEQ ID NO: 32638 - DNA, 50 bp, Emericella nidulans
gaattcactgcggccgccatgagtccggtaaattttattacctcgctgga

SEQ ID NO: 32639 - DNA, 41 bp, Emericella nidulans
gttctcgagacgagcgatcgccagcccacaacttcgccgta

SEQ ID NO: 32640 - DNA, 41 bp, Emericella nidulans
gaattcactgcggccgccatgagcccatcattgccgccgta

SEQ ID NO: 32641 - DNA, 41 bp, Emericella nidulans
gttctcgagacgagcgatcgcttggctgccgcttttccaca

SEQ ID NO: 32642 - DNA, 41 bp, Emericella nidulans
gaattcactgcggccgccatgcaggtcgtcagcgccatcca

SEQ ID NO: 32643 - DNA, 42 bp, Emericella nidulans
gttctcgagacgagcgatcgccaaccatccatgggtgctcca

SEQ ID NO: 32644 - DNA, 42 bp, Emericella nidulans; identical to SEQ ID NO: 30674

SEQ ID NO: 32645 - DNA, 52 bp, Emericella nidulans
gttctcgagacgagcgatcgcagggcatttcataacctcaatctattcagca

SEQ ID NO: 32646 - DNA, 41 bp, Emericella nidulans
gaattcactgcggccgccatggatcgagcccgccgctatcc

SEQ ID NO: 32647 - DNA, 46 bp, Emericella nidulans
gttctcgagacgagcgatcgcttagcgaggtctcccttggcgctta

SEQ ID NO: 32648 - DNA, 42 bp, Emericella nidulans
gaattcactgcggccgccatgtctcgccaaacctggtgaggg

SEQ ID NO: 32649 - DNA, 46 bp, Emericella nidulans
gttctcgagacgagcgatcgctccaggccatgaccatacctgaaga

SEQ ID NO: 32650 - DNA, 49 bp, Emericella nidulans
gaattcactgcggccgccatgatcaaagaccaaagcaatacggaccttg

SEQ ID NO: 32651 - DNA, 45 bp, Emericella nidulans
gttctcgagacgagcgatcgctgtcattcgttctcgcaattttgg

SEQ ID NO: 32652 - DNA, 41 bp, Emericella nidulans
gaattcactgcggccgccatgaaatgcaccccagcggcaag

SEQ ID NO: 32653 - DNA, 41 bp, Emericella nidulans
gttctcgagacgagcgatcgccacacgtgccacgcgagaaa

SEQ ID NO: 32654 - DNA, 41 bp, Emericella nidulans
gaattcactgcggccgccatgcggcctgacgacatcggact

SEQ ID NO: 32655 - DNA, 41 bp, Emericella nidulans
gttctcgagacgagcgatcgcgcagcctccgggctacgaca

SEQ ID NO: 32656 - DNA, 41 bp, Emericella nidulans
gaattcactgcggccgccatgtccgctggattccaggccac

SEQ ID NO: 32657 - DNA, 41 bp, Emericella nidulans
gttctcgagacgagcgatcgctcagccccggcagctgtact

SEQ ID NO: 32658 - DNA, 39 bp, Emericella nidulans
gaattcactgcggccgccatgaacgccgagcgccccttg

SEQ ID NO: 32659 - DNA, 42 bp, Emericella nidulans
gttctcgagacgagcgatcgcgcccatttgaccgccaagtcc

SEQ ID NO: 32660 - DNA, 41 bp, Emericella nidulans
gaattcactgcggccgccatgagacccggccgcatctcaca

SEQ ID NO: 32661 - DNA, 41 bp, Emericella nidulans
gttctcgagacgagcgatcgcgccctcccctccgcaacaag

SEQ ID NO: 32662 - DNA, 52 bp, Emericella nidulans
gaattcactgcggccgccatggaatgacttcgtgaacatcattttcaatcgt

SEQ ID NO: 32663 - DNA, 41 bp, Emericella nidulans
gttctcgagacgagcgatcgcgctggtacggaccggcacct

SEQ ID NO: 32664 - DNA, 43 bp, Emericella nidulans
gaattcactgcggccgccatgcaaacttgtgcctgctcctgtg

SEQ ID NO: 32665 - DNA, 41 bp, Emericella nidulans
gttctcgagacgagcgatcgcgtgtccgcggttgtggaggg

SEQ ID NO: 32666 - DNA, 41 bp, Emericella nidulans
gaattcactgcggccgccatggcattggccgtgcgatcaag

SEQ ID NO: 32667 - DNA, 41 bp, Emericella nidulans
gttctcgagacgagcgatcgcagggaccggcgacaagaggg

SEQ ID NO: 32668 - DNA, 43 bp, Emericella nidulans
gaattcactgcggccgccatgcagcgcagctatcgtcgtctcg

SEQ ID NO: 32669 - DNA, 42 bp, Emericella nidulans
gttctcgagacgagcgatcgctggcaacctgggaggaggagc

SEQ ID NO: 32670 - DNA, 41 bp, Emericella nidulans; identical to SEQ ID NO: 29268

SEQ ID NO: 32671 - DNA, 41 bp, Emericella nidulans
gttctcgagacgagcgatcgcgcgccacaaacgccttctcc

SEQ ID NO: 32672 - DNA, 42 bp, Emericella nidulans
gaattcactgcggccgccatgtgcgcctcacggttgagttga

SEQ ID NO: 32673 - DNA, 41 bp, Emericella nidulans
gttctcgagacgagcgatcgcgcggatctaggtccgccaac

SEQ ID NO: 32674 - DNA, 57 bp, Emericella nidulans
gaattcactgcggccgccatggagagccaccaataacactaaaagagtaccttacgc

SEQ ID NO: 32675 - DNA, 42 bp, Emericella nidulans
gttctcgagacgagcgatcgcgcgacgagcggtaatgccaaa

SEQ ID NO: 32676 - DNA, 56 bp, Emericella nidulans
gaattcactgcggccgccatgttatttggacagatattgattagatttcgcacagg

SEQ ID NO: 32677 - DNA, 43 bp, Emericella nidulans; identical to SEQ ID NO: 29437

SEQ ID NO: 32678 - DNA, 41 bp, Emericella nidulans
gaattcactgcggccgccatgacggggagcgacaaggaggg

SEQ ID NO: 32679 - DNA, 43 bp, Emericella nidulans
gttctcgagacgagcgatcgcccgaatgcctcgtttgctttgg

SEQ ID NO: 32680 - DNA, 41 bp, Emericella nidulans
gaattcactgcggccgccatgtggcgaggtgtccgagtggg

SEQ ID NO: 32681 - DNA, 42 bp, Emericella nidulans
gttctcgagacgagcgatcgccccccgatcattcccaacagc

SEQ ID NO: 32682 - DNA, 41 bp, Emericella nidulans
gaattcactgcggccgccatggcgccaaggagcagaaccgt

SEQ ID NO: 32683 - DNA, 55 bp, Emericella nidulans
gttctcgagacgagcgatcgccagacaatatcacatatagcttggttttagtccc

SEQ ID NO: 32684 - DNA, 45 bp, Emericella nidulans
gaattcactgcggccgccatgcctcgcatcttcactggcattctg

SEQ ID NO: 32685 - DNA, 42 bp, Emericella nidulans
gttctcgagacgagcgatcgccatcccgttctggcccgtaga

SEQ ID NO: 32686 - DNA, 42 bp, Emericella nidulans
gaattcactgcggccgccatggacgaacaggggcacggctta

SEQ ID NO: 32687 - DNA, 41 bp, Emericella nidulans
gttctcgagacgagcgatcgccgctgtagcgcgcccttctc

SEQ ID NO: 32688 - DNA, 51 bp, Emericella nidulans; identical to SEQ ID NO: 29206

SEQ ID NO: 32689 - DNA, 52 bp, Emericella nidulans
gttctcgagacgagcgatcgctgatcgtattgtgtacaggttgatattttcg

SEQ ID NO: 32690 - DNA, 42 bp, Emericella nidulans
gaattcactgcggccgccatgtcggctccaagaaccgtggtg

SEQ ID NO: 32691 - DNA, 44 bp, Emericella nidulans
gttctcgagacgagcgatcgctggggaacttctctttcccgatg

SEQ ID NO: 32692 - DNA, 45 bp, Emericella nidulans
gaattcactgcggccgccatgtggagaacgagaagggagaaatcg

SEQ ID NO: 32693 - DNA, 41 bp, Emericella nidulans
gttctcgagacgagcgatcgcagccgtcgcgctgggtaaga

SEQ ID NO: 32694 - DNA, 43 bp, Emericella nidulans
gaattcactgcggccgccatgcgcgtctcagtgaacggtctgg

SEQ ID NO: 32695 - DNA, 43 bp, Emericella nidulans
gttctcgagacgagcgatcgctgtgacagtcgcagcggttctg

SEQ ID NO: 32696 - DNA, 41 bp, Emericella nidulans
gaattcactgcggccgccatgtggtcagccaggagccgaca

SEQ ID NO: 32697 - DNA, 41 bp, Emericella nidulans
gttctcgagacgagcgatcgctcgctgtgcgttccgctttc

SEQ ID NO: 32698 - DNA, 42 bp, Emericella nidulans
gaattcactgcggccgccatgcattgctgccgtcgaagaggc

SEQ ID NO: 32699 - DNA, 52 bp, Emericella nidulans
gttctcgagacgagcgatcgcacaaataaaagaaacctaccaaagctgaggc

SEQ ID NO: 32700 - DNA, 41 bp, Emericella nidulans
gaattcactgcggccgccatgggtgcgtttggccaccgact

SEQ ID NO: 32701 - DNA, 41 bp, Emericella nidulans
gttctcgagacgagcgatcgctccagggcaaagcgatccaa

SEQ ID NO: 32702 - DNA, 44 bp, Emericella nidulans
gaattcactgcggccgccatgcggacagctggcctctgagagaa

SEQ ID NO: 32703 - DNA, 51 bp, Emericella nidulans
gttctcgagacgagcgatcgccggtccggtctaatactcttaaacctcatt

SEQ ID NO: 32704 - DNA, 43 bp, Emericella nidulans
gaattcactgcggccgccatgtcccatggtttctcccccgttt

SEQ ID NO: 32705 - DNA, 42 bp, Emericella nidulans
gttctcgagacgagcgatcgctgtccttgaagcggctggacc

SEQ ID NO: 32706 - DNA, 42 bp, Emericella nidulans
gaattcactgcggccgccatggaagccctccgtcgcatctcc

SEQ ID NO: 32707 - DNA, 43 bp, Emericella nidulans
gttctcgagacgagcgatcgccccacgcttagccagcttgtcc

SEQ ID NO: 32708 - DNA, 41 bp, Emericella nidulans
gaattcactgcggccgccatggcggaagatcatgggcgtca

SEQ ID NO: 32709 - DNA, 41 bp, Emericella nidulans
gttctcgagacgagcgatcgccacaatatccgcgccggtca

SEQ ID NO: 32710 - DNA, 41 bp, Emericella nidulans
gaattcactgcggccgccatgccatcacagcgccgctttcc

SEQ ID NO: 32711 - DNA, 42 bp, Emericella nidulans
gttctcgagacgagcgatcgctgctcgacgtaccccagcctc

SEQ ID NO: 32712 - DNA, 41 bp, Emericella nidulans
gaattcactgcggccgccatgtcgaagctgagccgtgtcgt

SEQ ID NO: 32713 - DNA, 50 bp, Emericella nidulans
gttctcgagacgagcgatcgcgccatattagtgctctccatgagctgctt

SEQ ID NO: 32714 - DNA, 47 bp, Emericella nidulans
gaattcactgcggccgccatgggtagaattcgctgcgtttattccct

SEQ ID NO: 32715 - DNA, 41 bp, Emericella nidulans
gttctcgagacgagcgatcgcacaaacaccgctgccgctga

SEQ ID NO: 32716 - DNA, 41 bp, Emericella nidulans
gaattcactgcggccgccatgggtgaagaaggcgcggaggg

SEQ ID NO: 32717 - DNA, 45 bp, Emericella nidulans
gttctcgagacgagcgatcgctagaagctcctcgcatgtccaatc

SEQ ID NO: 32718 - DNA, 41 bp, Emericella nidulans
gaattcactgcggccgccatgcgctcgcgggtaaccccttc

SEQ ID NO: 32719 - DNA, 41 bp, Emericella nidulans
gttctcgagacgagcgatcgcgcgtggacagcacgccagtc

SEQ ID NO: 32720 - DNA, 43 bp, Emericella nidulans
gaattcactgcggccgccatgcccatccaggcttgaagccaac

SEQ ID NO: 32721 - DNA, 41 bp, Emericella nidulans
gttctcgagacgagcgatcgccgcacgccttgcacgttctc

SEQ ID NO: 32722 - DNA, 52 bp, Emericella nidulans
gaattcactgcggccgccatgtaaaacacacagctgcttctttacctcttcc

SEQ ID NO: 32723 - DNA, 48 bp, Emericella nidulans
gttctcgagacgagcgatcgcattcactggaggaaggtctttgtgttg

SEQ ID NO: 32724 - DNA, 41 bp, Emericella nidulans
gaattcactgcggccgccatgagctgttccggtcgggggtc

SEQ ID NO: 32725 - DNA, 42 bp, Emericella nidulans
gttctcgagacgagcgatcgccgccggctgacactggccttg

SEQ ID NO: 32726 - DNA, 42 bp, Emericella nidulans
gaattcactgcggccgccatgccagccccgcttgaccaagtt

SEQ ID NO: 32727 - DNA, 42 bp, Emericella nidulans
gttctcgagacgagcgatcgctcctggctctgtaccccagca

SEQ ID NO: 32728 - DNA, 42 bp, Emericella nidulans
gaattcactgcggccgccatgcccatcgcagctagcggatca

SEQ ID NO: 32729 - DNA, 50 bp, Emericella nidulans
gttctcgagacgagcgatcgcggtaattagcaatatcttgccgtacatgc

SEQ ID NO: 32730 - DNA, 44 bp, Emericella nidulans
gaattcactgcggccgccatgtgaaatccgtttcctggctccaa

SEQ ID NO: 32731 - DNA, 41 bp, Emericella nidulans
gttctcgagacgagcgatcgccccggaaggacctgccactg

SEQ ID NO: 32732 - DNA, 42 bp, Emericella nidulans
gaattcactgcggccgccatgtccatccggcggtattgttca

SEQ ID NO: 32733 - DNA, 52 bp, Emericella nidulans
gttctcgagacgagcgatcgcttcaacttcttcttcctccttactcgtagcc

SEQ ID NO: 32734 - DNA, 50 bp, Emericella nidulans
gaattcactgcggccgccatgcattggcttgtctacaaagaatcccctca

SEQ ID NO: 32735 - DNA, 41 bp, Emericella nidulans
gttctcgagacgagcgatcgcaacgcccacaccacccatcc

SEQ ID NO: 32736 - DNA, 41 bp, Emericella nidulans
gaattcactgcggccgccatgtccgagcgtgagcgactgga

SEQ ID NO: 32737 - DNA, 42 bp, Emericella nidulans
gttctcgagacgagcgatcgcctggactgtcgacgcccgtgt

SEQ ID NO: 32738 - DNA, 43 bp, Emericella nidulans
gaattcactgcggccgccatgtgtcaatcgatgggcgaacctc

SEQ ID NO: 32739 - DNA, 43 bp, Emericella nidulans
gttctcgagacgagcgatcgccgggaagggcttcttcgctacc

SEQ ID NO: 32740 - DNA, 41 bp, Emericella nidulans
gaattcactgcggccgccatgagccgccggaaggtgttgag

SEQ ID NO: 32741 - DNA, 41 bp, Emericella nidulans
gttctcgagacgagcgatcgccgtcatccccctccgcttca

SEQ ID NO: 32742 - DNA, 42 bp, Emericella nidulans
gaattcactgcggccgccatgcctgaagagcacacccgccac

SEQ ID NO: 32743 - DNA, 41 bp, Emericella nidulans
gttctcgagacgagcgatcgcatcctccgtccggcctaccg

SEQ ID NO: 32744 - DNA, 41 bp, Emericella nidulans
gaattcactgcggccgccatgcgcggcgtcaaggtcctgat

SEQ ID NO: 32745 - DNA, 41 bp, Emericella nidulans
gttctcgagacgagcgatcgcatctcgctcgtcccggctcc

SEQ ID NO: 32746 - DNA, 43 bp, Emericella nidulans
gaattcactgcggccgccatgtccaacgacccatctccgcttc

SEQ ID NO: 32747 - DNA, 42 bp, Emericella nidulans
gttctcgagacgagcgatcgctccctccacctccacgctctg

SEQ ID NO: 32748 - DNA, 44 bp, Emericella nidulans
gaattcactgcggccgccatgggccaggccgataatgcttacga

SEQ ID NO: 32749 - DNA, 41 bp, Emericella nidulans
gttctcgagacgagcgatcgccatcgcggctgcccttcttg

SEQ ID NO: 32750 - DNA, 41 bp, Emericella nidulans
gaattcactgcggccgccatgagcgcgcaacgatgtcaacc

SEQ ID NO: 32751 - DNA, 43 bp, Emericella nidulans
gttctcgagacgagcgatcgcgcttttcgcctccatgctgaga

SEQ ID NO: 32752 - DNA, 41 bp, Emericella nidulans
gaattcactgcggccgccatgccgccgtccctcacagagga

SEQ ID NO: 32753 - DNA, 41 bp, Emericella nidulans
gttctcgagacgagcgatcgccccttgaccgcgatcggaac

SEQ ID NO: 32754 - DNA, 43 bp, Emericella nidulans
gaattcactgcggccgccatgtctgatgcagcgctccaaaacc

SEQ ID NO: 32755 - DNA, 41 bp, Emericella nidulans
gttctcgagacgagcgatcgcgcggaagaagggctggcaca

SEQ ID NO: 32756 - DNA, 41 bp, Emericella nidulans
gaattcactgcggccgccatgttgcagggctcgttcacggt

SEQ ID NO: 32757 - DNA, 42 bp, Emericella nidulans
gttctcgagacgagcgatcgctgcgcgcaggatcttgacttc

SEQ ID NO: 32758 - DNA, 42 bp, Emericella nidulans
gaattcactgcggccgccatgtcgaaggtgcgctcgttgtca

SEQ ID NO: 32759 - DNA, 41 bp, Emericella nidulans
gttctcgagacgagcgatcgccctgccgttggccttggact

SEQ ID NO: 32760 - DNA, 43 bp, Emericella nidulans
gaattcactgcggccgccatggcggctacacccatttccccta

SEQ ID NO: 32761 - DNA, 44 bp, Emericella nidulans
gttctcgagacgagcgatcgcgagcccgatccagactcttggtg

SEQ ID NO: 32762 - DNA, 50 bp, Emericella nidulans
gaattcactgcggccgccatgtcgtgcattcttactctacccatacacca

SEQ ID NO: 32763 - DNA, 53 bp, Emericella nidulans
gttctcgagacgagcgatcgcgctcttttctttcatcatcgtcttcttcaagc

SEQ ID NO: 32764 - DNA, 41 bp, Emericella nidulans
gaattcactgcggccgccatgactaccgcgaggcgcaggct

SEQ ID NO: 32765 - DNA, 56 bp, Emericella nidulans
gttctcgagacgagcgatcgcacttctgatatatattcgtccttcatatggcctca

SEQ ID NO: 32766 - DNA, 45 bp, Emericella nidulans
gaattcactgcggccgccatgtgggtacgtcccgatttttcctga

SEQ ID NO: 32767 - DNA, 45 bp, Emericella nidulans
gttctcgagacgagcgatcgcggcttctgcacaggaacctcatcc

SEQ ID NO: 32768 - DNA, 45 bp, Emericella nidulans
gaattcactgcggccgccatgcgccaaggtcgtcattgagcgtta

SEQ ID NO: 32769 - DNA, 41 bp, Emericella nidulans
gttctcgagacgagcgatcgcgctcgggctgctgctgggta

SEQ ID NO: 32770 - DNA, 51 bp, Emericella nidulans
gaattcactgcggccgccatggtcatcactgatatcgatgaaggtcgcttg

SEQ ID NO: 32771 - DNA, 43 bp, Emericella nidulans
gttctcgagacgagcgatcgcttcgacgtcagcagtcgaactc

SEQ ID NO: 32772 - DNA, 44 bp, Emericella nidulans
gaattcactgcggccgccatgccctccctccaaacgcctatttg

SEQ ID NO: 32773 - DNA, 41 bp, Emericella nidulans
gttctcgagacgagcgatcgcgcgccgctcagcttctgcac

SEQ ID NO: 32774 - DNA, 42 bp, Emericella nidulans
gaattcactgcggccgccatgagcgccgcattatgggaaatg

SEQ ID NO: 32775 - DNA, 50 bp, Emericella nidulans
gttctcgagacgagcgatcgccgctctcatcatcactgcctaggaactct

SEQ ID NO: 32776 - DNA, 42 bp, Emericella nidulans
gaattcactgcggccgccatgtcctctctcccgctccatccc

SEQ ID NO: 32777 - DNA, 50 bp, Emericella nidulans
gttctcgagacgagcgatcgcatcataattctcaagccccaaactcttca

SEQ ID NO: 32778 - DNA, 41 bp, Emericella nidulans
gaattcactgcggccgccatgattaaacgccgcccgcaagc

SEQ ID NO: 32779 - DNA, 44 bp, Emericella nidulans
gttctcgagacgagcgatcgctccacagagccatcagaccgaca

SEQ ID NO: 32780 - DNA, 54 bp, Emericella nidulans
gaattcactgcggccgccatgtctcttttacgacataatcttcacgtacattcc

SEQ ID NO: 32781 - DNA, 43 bp, Emericella nidulans
gttctcgagacgagcgatcgccccgcttcaaaccctcctaacc

SEQ ID NO: 32782 - DNA, 43 bp, Emericella nidulans
gaattcactgcggccgccatgcccccatagcgaacaagcaagc

SEQ ID NO: 32783 - DNA, 41 bp, Emericella nidulans
gttctcgagacgagcgatcgccagccgcttccgtctggtcc

SEQ ID NO: 32784 - DNA, 41 bp, Emericella nidulans
gaattcactgcggccgccatgggtgcaagccgcaacaagca

SEQ ID NO: 32785 - DNA, 48 bp, Emericella nidulans
gttctcgagacgagcgatcgcgagtcgtcggtcaccgaaacatctgta

SEQ ID NO: 32786 - DNA, 42 bp, Emericella nidulans
gaattcactgcggccgccatgtcgtgaaccagcccaaaccca

SEQ ID NO: 32787 - DNA, 41 bp, Emericella nidulans
gttctcgagacgagcgatcgccagctgcgccctgcgttagc

SEQ ID NO: 32788 - DNA, 46 bp, Emericella nidulans
gaattcactgcggccgccatgtggtctgggttgacaagtctggatg

SEQ ID NO: 32789 - DNA, 51 bp, Emericella nidulans
gttctcgagacgagcgatcgcaagatattcgataatcaatcccgcatgttg

SEQ ID NO: 32790 - DNA, 43 bp, Emericella nidulans
gaattcactgcggccgccatgatttattcggctcggctgagga

SEQ ID NO: 32791 - DNA, 41 bp, Emericella nidulans
gttctcgagacgagcgatcgctccgcccgcgtctcagattc

SEQ ID NO: 32792 - DNA, 41 bp, Emericella nidulans
gaattcactgcggccgccatggccgccatgcgccaactaat

SEQ ID NO: 32793 - DNA, 44 bp, Emericella nidulans
gttctcgagacgagcgatcgcccgataagccgaattcccgttca

SEQ ID NO: 32794 - DNA, 47 bp, Emericella nidulans
gaattcactgcggccgccatgtgaaggaaacacagcgtgtcaaacct

SEQ ID NO: 32795 - DNA, 50 bp, Emericella nidulans
gttctcgagacgagcgatcgcgatagtcaagttgtcttgccttcgcctga

SEQ ID NO: 32796 - DNA, 47 bp, Emericella nidulans
gaattcactgcggccgccatggggtcggcgaaatacaatgatagcag

SEQ ID NO: 32797 - DNA, 41 bp, Emericella nidulans
gttctcgagacgagcgatcgctctggctgccactgccttga

SEQ ID NO: 32798 - DNA, 45 bp, Emericella nidulans
gaattcactgcggccgccatgtcttcgttgccgagttctttccaa

SEQ ID NO: 32799 - DNA, 41 bp, Emericella nidulans
gttctcgagacgagcgatcgcccacacgacatcgccctgga

SEQ ID NO: 32800 - DNA, 48 bp, Emericella nidulans
gaattcactgcggccgccatgtcaccactgtctcttagctccttggtg

SEQ ID NO: 32801 - DNA, 41 bp, Emericella nidulans
gttctcgagacgagcgatcgctcctcgacttcgcggacgac

SEQ ID NO: 32802 - DNA, 41 bp, Emericella nidulans
gaattcactgcggccgccatgggccccgcgcttcctcatta

SEQ ID NO: 32803 - DNA, 43 bp, Emericella nidulans
gttctcgagacgagcgatcgctcgacgcctccatcttcccaaa

SEQ ID NO: 32804 - DNA, 42 bp, Emericella nidulans
gaattcactgcggccgccatgcgcttaaaaaccggccgctca

SEQ ID NO: 32805 - DNA, 48 bp, Emericella nidulans
gttctcgagacgagcgatcgctcagcagctcagaattcctcttgttcc

SEQ ID NO: 32806 - DNA, 41 bp, Emericella nidulans
gaattcactgcggccgccatgggggaacgccggttcgagtt

SEQ ID NO: 32807 - DNA, 43 bp, Emericella nidulans
gttctcgagacgagcgatcgccgttcaactcctcctccgcact

SEQ ID NO: 32808 - DNA, 41 bp, Emericella nidulans
gaattcactgcggccgccatgttcccgacccatcgcagctt

SEQ ID NO: 32809 - DNA, 48 bp, Emericella nidulans
gttctcgagacgagcgatcgccgagcgagtcgttatccggctaaactt

SEQ ID NO: 32810 - DNA, 41 bp, Emericella nidulans
gaattcactgcggccgccatgaccacccggcatgctccgta

SEQ ID NO: 32811 - DNA, 41 bp, Emericella nidulans
gttctcgagacgagcgatcgctgctcctcgctgggctccat

SEQ ID NO: 32812 - DNA, 41 bp, Emericella nidulans
gaattcactgcggccgccatgtcgcctcactggtccctccc

SEQ ID NO: 32813 - DNA, 41 bp, Emericella nidulans
gttctcgagacgagcgatcgcgtcccccaactccgcgacct

SEQ ID NO: 32814 - DNA, 41 bp, Emericella nidulans
gaattcactgcggccgccatgtcggccactcgcaagcaatc

SEQ ID NO: 32815 - DNA, 43 bp, Emericella nidulans
gttctcgagacgagcgatcgcttgtagctgaagcgggccgttg

SEQ ID NO: 32816 - DNA, 43 bp, Emericella nidulans
gaattcactgcggccgccatgtctggtcagggcctctccttcc

SEQ ID NO: 32817 - DNA, 41 bp, Emericella nidulans
gttctcgagacgagcgatcgcccgaaaccctggccccttgt

SEQ ID NO: 32818 - DNA, 44 bp, Emericella nidulans
gaattcactgcggccgccatgtggattgacggtgttgctggtga

SEQ ID NO: 32819 - DNA, 41 bp, Emericella nidulans
gttctcgagacgagcgatcgctggcacccctctcctgctca

SEQ ID NO: 32820 - DNA, 41 bp, Emericella nidulans
gaattcactgcggccgccatgctgccccagaagtgcccacc

SEQ ID NO: 32821 - DNA, 41 bp, Emericella nidulans
gttctcgagacgagcgatcgctccaagcccgtaacggcaaa

SEQ ID NO: 32822 - DNA, 53 bp, Emericella nidulans
gaattcactgcggccgccatgataaggtactcgactctcgataatgtggatgg

SEQ ID NO: 32823 - DNA, 42 bp, Emericella nidulans
gttctcgagacgagcgatcgcggcttctgcgcgctgaaatga

SEQ ID NO: 32824 - DNA, 57 bp, Emericella nidulans
gaattcactgcggccgccatgtgagttacctacgactctttgagaataataggattt

SEQ ID NO: 32825 - DNA, 41 bp, Emericella nidulans
gttctcgagacgagcgatcgccccgagtcctccaccactga

SEQ ID NO: 32826 - DNA, 45 bp, Emericella nidulans
gaattcactgcggccgccatgccatggccgatatcgatgtcaaga

SEQ ID NO: 32827 - DNA, 53 bp, Emericella nidulans
gttctcgagacgagcgatcgcgccatttgatagattaaaagccatatcgcaac

SEQ ID NO: 32828 - DNA, 42 bp, Emericella nidulans
gaattcactgcggccgccatgcgtcagatcccgaagcgctca

SEQ ID NO: 32829 - DNA, 44 bp, Emericella nidulans
gttctcgagacgagcgatcgcggagtcaagacggtcgaagaagc

SEQ ID NO: 32830 - DNA, 41 bp, Emericella nidulans
gaattcactgcggccgccatgggcaagctcgcggatctggt

SEQ ID NO: 32831 - DNA, 42 bp, Emericella nidulans
gttctcgagacgagcgatcgccctgcgtcaatggcagcgtct

SEQ ID NO: 32832 - DNA, 41 bp, Emericella nidulans
gaattcactgcggccgccatgtgtcgctggcgttgctgacc

SEQ ID NO: 32833 - DNA, 43 bp, Emericella nidulans
gttctcgagacgagcgatcgctgcgcgtaacctcagaggcaag

SEQ ID NO: 32834 - DNA, 43 bp, Emericella nidulans
gaattcactgcggccgccatgcgtctgcatgccagacatgggt

SEQ ID NO: 32835 - DNA, 46 bp, Emericella nidulans
gttctcgagacgagcgatcgcgcgcggcttcaacaaatacaattcc

SEQ ID NO: 32836 - DNA, 53 bp, Emericella nidulans
gaattcactgcggccgccatgacctatctctatgtcaaagggagtcgactggt

SEQ ID NO: 32837 - DNA, 41 bp, Emericella nidulans
gttctcgagacgagcgatcgcccacgtatgggctcggggtt

SEQ ID NO: 32838 - DNA, 53 bp, Emericella nidulans
gaattcactgcggccgccatgcgagatgatctagtaaatctctcaggcacacg

SEQ ID NO: 32839 - DNA, 52 bp, Emericella nidulans
gttctcgagacgagcgatcgccttaacagtacacagagtctttccctcctca

SEQ ID NO: 32840 - DNA, 41 bp, Emericella nidulans
gaattcactgcggccgccatgcgggctggcggatagcaaaa

SEQ ID NO: 32841 - DNA, 42 bp, Emericella nidulans
gttctcgagacgagcgatcgcttctcccacccggcagaagag

SEQ ID NO: 32842 - DNA, 42 bp, Emericella nidulans
gaattcactgcggccgccatgtcgatagcgcgttgcgagtca

SEQ ID NO: 32843 - DNA, 41 bp, Emericella nidulans
gttctcgagacgagcgatcgcttaatggcggccctgcaacc

SEQ ID NO: 32844 - DNA, 41 bp, Emericella nidulans
gaattcactgcggccgccatgctcccccttgtcggcgacct

SEQ ID NO: 32845 - DNA, 41 bp, Emericella nidulans
gttctcgagacgagcgatcgcttgcgatgccggtcatggag

SEQ ID NO: 32846 - DNA, 41 bp, Emericella nidulans
gaattcactgcggccgccatggcatccgtctcgcgcgtttt

SEQ ID NO: 32847 - DNA, 53 bp, Emericella nidulans
gttctcgagacgagcgatcgcctatgggactcgagtatattactgtgtcttcg

SEQ ID NO: 32848 - DNA, 41 bp, Emericella nidulans
gaattcactgcggccgccatgcggcaaacagcgtcggaagg

SEQ ID NO: 32849 - DNA, 43 bp, Emericella nidulans
gttctcgagacgagcgatcgcgggaaatatcttggccccagca

SEQ ID NO: 32850 - DNA, 41 bp, Emericella nidulans
gaattcactgcggccgccatgctcggcgcggaccagaacac

SEQ ID NO: 32851 - DNA, 43 bp, Emericella nidulans
gttctcgagacgagcgatcgctccagcaattcctgcagctccc

SEQ ID NO: 32852 - DNA, 43 bp, Emericella nidulans
gaattcactgcggccgccatgtggggatcaatgcccaaagtgc

SEQ ID NO: 32853 - DNA, 41 bp, Emericella nidulans
gttctcgagacgagcgatcgccgactgcacaaagggcagca

SEQ ID NO: 32854 - DNA, 41 bp, Emericella nidulans
gaattcactgcggccgccatgcgcagagccatcggtgatgc

SEQ ID NO: 32855 - DNA, 42 bp, Emericella nidulans
gttctcgagacgagcgatcgcccaatgttgcccatccgggag

SEQ ID NO: 32856 - DNA, 41 bp, Emericella nidulans
gaattcactgcggccgccatgggggattcgaggcggaaacg

SEQ ID NO: 32857 - DNA, 41 bp, Emericella nidulans
gttctcgagacgagcgatcgcgggcacccggtactgctcca

SEQ ID NO: 32858 - DNA, 43 bp, Emericella nidulans
gaattcactgcggccgccatggcggcaactatcccctcgcaat

SEQ ID NO: 32859 - DNA, 47 bp, Emericella nidulans
gttctcgagacgagcgatcgcccaccagtcttgacgacataccctga

SEQ ID NO: 32860 - DNA, 42 bp, Emericella nidulans
gaattcactgcggccgccatgtgccttggacgcaaaagacat

SEQ ID NO: 32861 - DNA, 49 bp, Emericella nidulans
gttctcgagacgagcgatcgctcactccttctccccctgaatagtagca

SEQ ID NO: 32862 - DNA, 41 bp, Emericella nidulans
gaattcactgcggccgccatgtccccgtcaccctgctctcg

SEQ ID NO: 32863 - DNA, 42 bp, Emericella nidulans
gttctcgagacgagcgatcgcgggccccttcaacttccagca

SEQ ID NO: 32864 - DNA, 50 bp, Emericella nidulans
gaattcactgcggccgccatgatgaccccaaacaccgaactagataataa

SEQ ID NO: 32865 - DNA, 41 bp, Emericella nidulans
gttctcgagacgagcgatcgccgctcccgtgtccgccaata

SEQ ID NO: 32866 - DNA, 42 bp, Emericella nidulans
gaattcactgcggccgccatgtgcagcgaaccctgcaagagg

SEQ ID NO: 32867 - DNA, 48 bp, Emericella nidulans
gttctcgagacgagcgatcgcgaacatttccggtgtaaattcgcggta

SEQ ID NO: 32868 - DNA, 46 bp, Emericella nidulans
gaattcactgcggccgccatgcctgggggctctattgctacaatgc

SEQ ID NO: 32869 - DNA, 43 bp, Emericella nidulans
gttctcgagacgagcgatcgctgcgtcaggtcgcttctcatgg

SEQ ID NO: 32870 - DNA, 50 bp, Emericella nidulans
gaattcactgcggccgccatgagtcaacatttttctctgtatcagcatcg

SEQ ID NO: 32871 - DNA, 42 bp, Emericella nidulans
gttctcgagacgagcgatcgcgcctgtccatcaacgcctggt

SEQ ID NO: 32872 - DNA, 42 bp, Emericella nidulans
gaattcactgcggccgccatggccgacgagcactaccccctc

SEQ ID NO: 32873 - DNA, 41 bp, Emericella nidulans
gttctcgagacgagcgatcgcttgcatggcctcccactccc

SEQ ID NO: 32874 - DNA, 43 bp, Emericella nidulans
gaattcactgcggccgccatgtgattgtcgatgttggcggagg

SEQ ID NO: 32875 - DNA, 43 bp, Emericella nidulans
gttctcgagacgagcgatcgctcccatcacccccttcatcagg

SEQ ID NO: 32876 - DNA, 43 bp, Emericella nidulans
gaattcactgcggccgccatgggagcgacctgcgcagtgtgta

SEQ ID NO: 32877 - DNA, 46 bp, Emericella nidulans
gttctcgagacgagcgatcgcagcagcatacctgggataacaatcg

SEQ ID NO: 32878 - DNA, 42 bp, Emericella nidulans
gaattcactgcggccgccatgcggagaaaggtcccattgacg

SEQ ID NO: 32879 - DNA, 41 bp, Emericella nidulans
gttctcgagacgagcgatcgcgcgcaaaccacgctcccagt

SEQ ID NO: 32880 - DNA, 41 bp, Emericella nidulans
gaattcactgcggccgccatgagcaccgccggaggatccaa

SEQ ID NO: 32881 - DNA, 53 bp, Emericella nidulans
gttctcgagacgagcgatcgcgttgtagaactttctcataatcagatgcagga

SEQ ID NO: 32882 - DNA, 41 bp, Emericella nidulans
gaattcactgcggccgccatggcaacgccatgaccggcttc

SEQ ID NO: 32883 - DNA, 41 bp, Emericella nidulans
gttctcgagacgagcgatcgccagcgcggtcgacactccat

SEQ ID NO: 32884 - DNA, 41 bp, Emericella nidulans
gaattcactgcggccgccatgccccgatttccgtccgcttc

SEQ ID NO: 32885 - DNA, 44 bp, Emericella nidulans
gttctcgagacgagcgatcgctcggagcaacctcaatgggaatg

SEQ ID NO: 32886 - DNA, 41 bp, Emericella nidulans
gaattcactgcggccgccatgatgcgggcgatttggtgcat

SEQ ID NO: 32887 - DNA, 46 bp, Emericella nidulans
gttctcgagacgagcgatcgctaatcatatccttcatccggccaag

SEQ ID NO: 32888 - DNA, 43 bp, Emericella nidulans
gaattcactgcggccgccatgccacttctgctctcgcccggta

SEQ ID NO: 32889 - DNA, 43 bp, Emericella nidulans
gttctcgagacgagcgatcgctcctgcgtagtcccatccacca

SEQ ID NO: 32890 - DNA, 41 bp, Emericella nidulans
gaattcactgcggccgccatgcgtcgttgccaagggggaca

SEQ ID NO: 32891 - DNA, 44 bp, Emericella nidulans
gttctcgagacgagcgatcgcggtcgtcttgtcgccaaactgga

SEQ ID NO: 32892 - DNA, 41 bp, Emericella nidulans
gaattcactgcggccgccatgcgccgctgaatcgtcgtggt

SEQ ID NO: 32893 - DNA, 42 bp, Emericella nidulans
gttctcgagacgagcgatcgcggcgtagccgggatatgtggc

SEQ ID NO: 32894 - DNA, 42 bp, Emericella nidulans
gaattcactgcggccgccatgcgaggccaccaacgaagaacg

SEQ ID NO: 32895 - DNA, 42 bp, Emericella nidulans
gttctcgagacgagcgatcgctgctttgcgctcttcgccaaa

SEQ ID NO: 32896 - DNA, 48 bp, Emericella nidulans
gaattcactgcggccgccatgactcttcacctctctttcatcagaccc

SEQ ID NO: 32897 - DNA, 41 bp, Emericella nidulans
gttctcgagacgagcgatcgcccgggtggatgggctttgag

SEQ ID NO: 32898 - DNA, 45 bp, Emericella nidulans
gaattcactgcggccgccatggcatcgactcagggaaaagccaga

SEQ ID NO: 32899 - DNA, 47 bp, Emericella nidulans
gttctcgagacgagcgatcgcacacagtcagcactgtagacggttcg

SEQ ID NO: 32900 - DNA, 44 bp, Emericella nidulans
gaattcactgcggccgccatgcgagaagctgccctccgtaacga

SEQ ID NO: 32901 - DNA, 55 bp, Emericella nidulans
gttctcgagacgagcgatcgcgttcgttcctgacgttttagatgtagttcttgtg

SEQ ID NO: 32902 - DNA, 41 bp, Emericella nidulans
gaattcactgcggccgccatggctcgtttgcggacgctagg

SEQ ID NO: 32903 - DNA, 44 bp, Emericella nidulans
gttctcgagacgagcgatcgccctttgcctgcttggttgtagca

SEQ ID NO: 32904 - DNA, 41 bp, Emericella nidulans
gaattcactgcggccgccatggcgcgcctatcgatgcgact

SEQ ID NO: 32905 - DNA, 45 bp, Emericella nidulans
gttctcgagacgagcgatcgccgccttcctccttctgtttcctcc

SEQ ID NO: 32906 - DNA, 41 bp, Emericella nidulans
gaattcactgcggccgccatgtcccccagctcgtcctccct

SEQ ID NO: 32907 - DNA, 41 bp, Emericella nidulans
gttctcgagacgagcgatcgccccgcctgtcccctcctcat

SEQ ID NO: 32908 - DNA, 43 bp, Emericella nidulans
gaattcactgcggccgccatgcgcaactgcaatcaacgcatcc

SEQ ID NO: 32909 - DNA, 45 bp, Emericella nidulans
gttctcgagacgagcgatcgcccacttctttggagagcggcaatg

SEQ ID NO: 32910 - DNA, 45 bp, Emericella nidulans
gaattcactgcggccgccatgccctccaccatcaaaaacaccacc

SEQ ID NO: 32911 - DNA, 46 bp, Emericella nidulans
gttctcgagacgagcgatcgctccactgacctcaattggaacacca

SEQ ID NO: 32912 - DNA, 41 bp, Emericella nidulans
gaattcactgcggccgccatgtgtcggtcccgtcggatcaa

SEQ ID NO: 32913 - DNA, 41 bp, Emericella nidulans
gttctcgagacgagcgatcgctcaggtaagtggcccgtgct

SEQ ID NO: 32914 - DNA, 42 bp, Emericella nidulans
gaattcactgcggccgccatgcgcccgcacaactcagagaga

SEQ ID NO: 32915 - DNA, 46 bp, Emericella nidulans
gttctcgagacgagcgatcgccgcccatcactgtattcaggaactc

SEQ ID NO: 32916 - DNA, 41 bp, Emericella nidulans
gaattcactgcggccgccatggctgtcgtgatgcgcaccgt

SEQ ID NO: 32917 - DNA, 46 bp, Emericella nidulans
gttctcgagacgagcgatcgcccagcgcaggaacaatcttcttcaa

SEQ ID NO: 32918 - DNA, 41 bp, Emericella nidulans
gaattcactgcggccgccatgacgcccaacgtgctgagctg

SEQ ID NO: 32919 - DNA, 46 bp, Emericella nidulans
gttctcgagacgagcgatcgcgatgttaggcccaactgcatgtgct

SEQ ID NO: 32920 - DNA, 41 bp, Emericella nidulans
gaattcactgcggccgccatgcggatcctcgtccccgtcaa

SEQ ID NO: 32921 - DNA, 41 bp, Emericella nidulans
gttctcgagacgagcgatcgcccgtcgatcgcctgctttcc

SEQ ID NO: 32922 - DNA, 41 bp, Emericella nidulans
gaattcactgcggccgccatgcccgccattcatgagcagca

SEQ ID NO: 32923 - DNA, 41 bp, Emericella nidulans
gttctcgagacgagcgatcgcggaccgtaaacccggcctcc

SEQ ID NO: 32924 - DNA, 43 bp, Emericella nidulans
gaattcactgcggccgccatgcaacgaggacagggcccttgga

SEQ ID NO: 32925 - DNA, 41 bp, Emericella nidulans
gttctcgagacgagcgatcgccagcgggcggggaagtgaac

SEQ ID NO: 32926 - DNA, 46 bp, Emericella nidulans
gaattcactgcggccgccatgcaatcattgtcactggtgcctctcg

SEQ ID NO: 32927 - DNA, 45 bp, Emericella nidulans
gttctcgagacgagcgatcgctcctcacccaagctcaaagccaaa

SEQ ID NO: 32928 - DNA, 46 bp, Emericella nidulans
gaattcactgcggccgccatgtggagaggtaacactgccaacgtca

SEQ ID NO: 32929 - DNA, 46 bp, Emericella nidulans
gttctcgagacgagcgatcgcgacggtgtcgagagggtaagaagca

SEQ ID NO: 32930 - DNA, 50 bp, Emericella nidulans
gaattcactgcggccgccatgtcggactaatcaatttccaaagctcaaca

SEQ ID NO: 32931 - DNA, 48 bp, Emericella nidulans
gttctcgagacgagcgatcgcggatcggcctgtgtctgatacaaattc

SEQ ID NO: 32932 - DNA, 48 bp, Emericella nidulans
gaattcactgcggccgccatgtactccagtcctcgagcctcaagtaag

SEQ ID NO: 32933 - DNA, 42 bp, Emericella nidulans
gttctcgagacgagcgatcgcccaatcttgcccccaagcacc

SEQ ID NO: 32934 - DNA, 43 bp, Emericella nidulans
gaattcactgcggccgccatgtgctcactcatgggtctggtgc

SEQ ID NO: 32935 - DNA, 42 bp, Emericella nidulans
gttctcgagacgagcgatcgctccagtccttgatggcgtccc

SEQ ID NO: 32936 - DNA, 41 bp, Emericella nidulans
gaattcactgcggccgccatgcgaaacccctccgcgtcctc

SEQ ID NO: 32937 - DNA, 42 bp, Emericella nidulans
gttctcgagacgagcgatcgcggtcgtcggatcgcttcatgc

SEQ ID NO: 32938 - DNA, 44 bp, Emericella nidulans
gaattcactgcggccgccatgtgacgacgggcgtcttctctttc

SEQ ID NO: 32939 - DNA, 41 bp, Emericella nidulans
gttctcgagacgagcgatcgctcctccccggctcccatctc

SEQ ID NO: 32940 - DNA, 41 bp, Emericella nidulans
gaattcactgcggccgccatggtgggcgcctttgctgacaa

SEQ ID NO: 32941 - DNA, 43 bp, Emericella nidulans
gttctcgagacgagcgatcgcgcacgaatgaggccgaaaagca

SEQ ID NO: 32942 - DNA, 51 bp, Emericella nidulans
gaattcactgcggccgccatgaccatagcaaatctaacacctgcaggaaca

SEQ ID NO: 32943 - DNA, 43 bp, Emericella nidulans
gttctcgagacgagcgatcgctgaccggggtatcctcgacctg

SEQ ID NO: 32944 - DNA, 41 bp, Emericella nidulans
gaattcactgcggccgccatgggccacgaagccagcgacat

SEQ ID NO: 32945 - DNA, 52 bp, Emericella nidulans
gttctcgagacgagcgatcgcatagacacccttcctagactgataacgtggg

SEQ ID NO: 32946 - DNA, 44 bp, Emericella nidulans
gaattcactgcggccgccatgtgcgcaatgttgtcaaaggggat

SEQ ID NO: 32947 - DNA, 41 bp, Emericella nidulans
gttctcgagacgagcgatcgctcgcaaggcgttcaccaccc

SEQ ID NO: 32948 - DNA, 41 bp, Emericella nidulans
gaattcactgcggccgccatgccgcccacgctatccccaat

SEQ ID NO: 32949 - DNA, 41 bp, Emericella nidulans
gttctcgagacgagcgatcgcagcgcaatgcagggcagtga

SEQ ID NO: 32950 - DNA, 41 bp, Emericella nidulans
gaattcactgcggccgccatgatctcggccgggatcggctc

SEQ ID NO: 32951 - DNA, 41 bp, Emericella nidulans
gttctcgagacgagcgatcgccctcaggcgccctctccctc

SEQ ID NO: 32952 - DNA, 41 bp, Emericella nidulans
gaattcactgcggccgccatggcagcgcgggaggtgaaaga

SEQ ID NO: 32953 - DNA, 44 bp, Emericella nidulans
gttctcgagacgagcgatcgccgaggccatggggaaagaagatg

SEQ ID NO: 32954 - DNA, 49 bp, Emericella nidulans
gaattcactgcggccgccatgcgagacaaacgaagagaaaggagcagat

SEQ ID NO: 32955 - DNA, 50 bp, Emericella nidulans
gttctcgagacgagcgatcgcttcatgtactgtcgatactccgtcttctt

SEQ ID NO: 32956 - DNA, 51 bp, Emericella nidulans
gaattcactgcggccgccatgtctgtagcttcacttagcaacatgtgatgg

SEQ ID NO: 32957 - DNA, 41 bp, Emericella nidulans
gttctcgagacgagcgatcgcgccaatctcgcacgcctcct

SEQ ID NO: 32958 - DNA, 41 bp, Emericella nidulans
gaattcactgcggccgccatgccatcgcaaccggcaaatcc

SEQ ID NO: 32959 - DNA, 41 bp, Emericella nidulans
gttctcgagacgagcgatcgcccttcacgtcgccctggctc

SEQ ID NO: 32960 - DNA, 41 bp, Emericella nidulans
gaattcactgcggccgccatgggactgcccggccgactgtt

SEQ ID NO: 32961 - DNA, 41 bp, Emericella nidulans
gttctcgagacgagcgatcgccggtggaatgtgcggtggtg

SEQ ID NO: 32962 - DNA, 50 bp, Emericella nidulans
gaattcactgcggccgccatggtaacactggtatggaacccggtaagacc

SEQ ID NO: 32963 - DNA, 42 bp, Emericella nidulans; identical to SEQ ID NO: 29275

SEQ ID NO: 32964 - DNA, 41 bp, Emericella nidulans
gaattcactgcggccgccatgccctctcccgccgtctcctt

SEQ ID NO: 32965 - DNA, 41 bp, Emericella nidulans
gttctcgagacgagcgatcgcagggcgcattttcgcagcac

SEQ ID NO: 32966 - DNA, 43 bp, Emericella nidulans
gaattcactgcggccgccatgccaacccgaaattgcccattga

SEQ ID NO: 32967 - DNA, 41 bp, Emericella nidulans
gttctcgagacgagcgatcgctggtggtcagcaccgccact

SEQ ID NO: 32968 - DNA, 41 bp, Emericella nidulans
gaattcactgcggccgccatggaacgccgcccgattcttga

SEQ ID NO: 32969 - DNA, 55 bp, Emericella nidulans
gttctcgagacgagcgatcgcaccaaacagctgctctttatagaatttcatctcc

SEQ ID NO: 32970 - DNA, 41 bp, Emericella nidulans
gaattcactgcggccgccatgcaacgcaccgctcagcctca

SEQ ID NO: 32971 - DNA, 41 bp, Emericella nidulans
gttctcgagacgagcgatcgccgcccagaccaggcaacgaa

SEQ ID NO: 32972 - DNA, 48 bp, Emericella nidulans
gaattcactgcggccgccatgtccagaacataatgacgacccgatctc

SEQ ID NO: 32973 - DNA, 55 bp, Emericella nidulans
gttctcgagacgagcgatcgcaagaaatgtataaaaacttggaaaaacaagttcc

SEQ ID NO: 32974 - DNA, 55 bp, Emericella nidulans
gaattcactgcggccgccatgagaagctttcagtcaaaggtcatactgaccgagt

SEQ ID NO: 32975 - DNA, 43 bp, Emericella nidulans
gttctcgagacgagcgatcgctgtgtgctccaattccgcctgt

SEQ ID NO: 32976 - DNA, 45 bp, Emericella nidulans
gaattcactgcggccgccatgccaaatggacggagtaggcaacga

SEQ ID NO: 32977 - DNA, 44 bp, Emericella nidulans
gttctcgagacgagcgatcgctgtccattccgcgttcctcttca

SEQ ID NO: 32978 - DNA, 44 bp, Emericella nidulans
gaattcactgcggccgccatgtgggttgattggatgggttgtgg

SEQ ID NO: 32979 - DNA, 42 bp, Emericella nidulans
gttctcgagacgagcgatcgcccccgctcgtcttctcctgct

SEQ ID NO: 32980 - DNA, 44 bp, Emericella nidulans
gaattcactgcggccgccatgcccattattgggagcacccttgc

SEQ ID NO: 32981 - DNA, 44 bp, Emericella nidulans
gttctcgagacgagcgatcgctgagcgttcccagcgccccaata

SEQ ID NO: 32982 - DNA, 42 bp, Emericella nidulans; identical to SEQ ID NO: 29396

SEQ ID NO: 32983 - DNA, 41 bp, Emericella nidulans
gttctcgagacgagcgatcgcgggcaccctccttgccttcc

SEQ ID NO: 32984 - DNA, 43 bp, Emericella nidulans
gaattcactgcggccgccatgcctcccattcacgccagactcc

SEQ ID NO: 32985 - DNA, 43 bp, Emericella nidulans
gttctcgagacgagcgatcgccccccaaacatcctcctgccac

SEQ ID NO: 32986 - DNA, 41 bp, Emericella nidulans
gaattcactgcggccgccatgtccaacgccccacatcctcc

SEQ ID NO: 32987 - DNA, 41 bp, Emericella nidulans
gttctcgagacgagcgatcgcgcgagctccgtgccaacctg

SEQ ID NO: 32988 - DNA, 44 bp, Emericella nidulans
gaattcactgcggccgccatgtcggcagaggctgtctacagtga

SEQ ID NO: 32989 - DNA, 41 bp, Emericella nidulans
gttctcgagacgagcgatcgctaatcggccgagcagggtcc

SEQ ID NO: 32990 - DNA, 43 bp, Emericella nidulans
gaattcactgcggccgccatgtcctggaaacgaggcctccaga

SEQ ID NO: 32991 - DNA, 43 bp, Emericella nidulans
gttctcgagacgagcgatcgcgcgagtcgtttcaaccgtggtg

SEQ ID NO: 32992 - DNA, 42 bp, Emericella nidulans
gaattcactgcggccgccatgtgcgtccgcttagcccacgtt

SEQ ID NO: 32993 - DNA, 41 bp, Emericella nidulans
gttctcgagacgagcgatcgccctgctcgccctccaactcc

SEQ ID NO: 32994 - DNA, 43 bp, Emericella nidulans
gaattcactgcggccgccatgtccatcgcagctctgaccatca

SEQ ID NO: 32995 - DNA, 41 bp, Emericella nidulans
gttctcgagacgagcgatcgcgccctccgggacttcggaca

SEQ ID NO: 32996 - DNA, 50 bp, Emericella nidulans
gaattcactgcggccgccatgcagtttatcgtcaacgagaacggtactgc

SEQ ID NO: 32997 - DNA, 41 bp, Emericella nidulans
gttctcgagacgagcgatcgcgtcgctggcttcggcagtgt

SEQ ID NO: 32998 - DNA, 41 bp, Emericella nidulans
gaattcactgcggccgccatgtcgcgatgggccctcaaatc

SEQ ID NO: 32999 - DNA, 46 bp, Emericella nidulans
gttctcgagacgagcgatcgccggaggtatcaggtcgctcttttgg

SEQ ID NO: 33000 - DNA, 41 bp, Emericella nidulans
gaattcactgcggccgccatgggactggcgacccgatccac

SEQ ID NO: 33001 - DNA, 43 bp, Emericella nidulans
gttctcgagacgagcgatcgccggtgctcttcttctgcgcctc

SEQ ID NO: 33002 - DNA, 41 bp, Emericella nidulans; identical to SEQ ID NO: 29438

SEQ ID NO: 33003 - DNA, 41 bp, Emericella nidulans
gttctcgagacgagcgatcgcgtcggcggcgaacttggaga

SEQ ID NO: 33004 - DNA, 43 bp, Emericella nidulans
gaattcactgcggccgccatgccgtcgatgtcatttccgctca

SEQ ID NO: 33005 - DNA, 42 bp, Emericella nidulans
gttctcgagacgagcgatcgccgaggtgcgcttgaagaccgt

SEQ ID NO: 33006 - DNA, 49 bp, Emericella nidulans
gaattcactgcggccgccatgatgattaagatgggtgttctcttggtcc

SEQ ID NO: 33007 - DNA, 41 bp, Emericella nidulans
gttctcgagacgagcgatcgcgctgacgagccagccagcaa

SEQ ID NO: 33008 - DNA, 47 bp, Emericella nidulans
gaattcactgcggccgccatgcgctggaccacctagtccagcttatg

SEQ ID NO: 33009 - DNA, 41 bp, Emericella nidulans
gttctcgagacgagcgatcgctgacacccgtgctggctgct

SEQ ID NO: 33010 - DNA, 42 bp, Emericella nidulans
gaattcactgcggccgccatgtggcgaagggcaagctagcag

SEQ ID NO: 33011 - DNA, 41 bp, Emericella nidulans
gttctcgagacgagcgatcgcttgcggccaaggtgccgtat

SEQ ID NO: 33012 - DNA, 42 bp, Emericella nidulans
gaattcactgcggccgccatgggcggctatgaccctcgcata

SEQ ID NO: 33013 - DNA, 41 bp, Emericella nidulans
gttctcgagacgagcgatcgcccacccccagcattcccaaa

SEQ ID NO: 33014 - DNA, 52 bp, Emericella nidulans
gaattcactgcggccgccatgattctcgatactcgagttgcagaaactactc

SEQ ID NO: 33015 - DNA, 41 bp, Emericella nidulans
gttctcgagacgagcgatcgcttcctcggtcggcacgtcct

SEQ ID NO: 33016 - DNA, 41 bp, Emericella nidulans
gaattcactgcggccgccatggcgggctgaccggaattggt

SEQ ID NO: 33017 - DNA, 39 bp, Emericella nidulans
gttctcgagacgagcgatcgcagcccccgggcggagatt

SEQ ID NO: 33018 - DNA, 43 bp, Emericella nidulans
gaattcactgcggccgccatgcccggttccggaaagactgagc

SEQ ID NO: 33019 - DNA, 42 bp, Emericella nidulans
gttctcgagacgagcgatcgctcctgcacgtcaagcctgcaa

SEQ ID NO: 33020 - DNA, 42 bp, Emericella nidulans
gaattcactgcggccgccatgcgaacgtaagcgttgcccacc

SEQ ID NO: 33021 - DNA, 45 bp, Emericella nidulans
gttctcgagacgagcgatcgctgaataaaaggatagcgcagtggc

SEQ ID NO: 33022 - DNA, 41 bp, Emericella nidulans
gaattcactgcggccgccatgccgctcaaagtcgccgagga

SEQ ID NO: 33023 - DNA, 45 bp, Emericella nidulans
gttctcgagacgagcgatcgctgctgcagatctttcgccaactca

SEQ ID NO: 33024 - DNA, 43 bp, Emericella nidulans
gaattcactgcggccgccatgccgcagccagtctttcaggtcc

SEQ ID NO: 33025 - DNA, 42 bp, Emericella nidulans
gttctcgagacgagcgatcgctccgatgttgacgcctgatcg

SEQ ID NO: 33026 - DNA, 41 bp, Emericella nidulans
gaattcactgcggccgccatgcttgaccggaacgcccgcta

SEQ ID NO: 33027 - DNA, 41 bp, Emericella nidulans
gttctcgagacgagcgatcgctgtcgctccctcccacagca

SEQ ID NO: 33028 - DNA, 47 bp, Emericella nidulans
gaattcactgcggccgccatgaccgcgtaccagagtttgaagaacta

SEQ ID NO: 33029 - DNA, 41 bp, Emericella nidulans
gttctcgagacgagcgatcgcctcccgctcgccagcaactc

SEQ ID NO: 33030 - DNA, 41 bp, Emericella nidulans
gaattcactgcggccgccatgtgagccgccgtcccttcata

SEQ ID NO: 33031 - DNA, 41 bp, Emericella nidulans
gttctcgagacgagcgatcgccacggccaccccagttacgg

SEQ ID NO: 33032 - DNA, 41 bp, Emericella nidulans
gaattcactgcggccgccatgcgccagtcgctcgggttgat

SEQ ID NO: 33033 - DNA, 52 bp, Emericella nidulans
gttctcgagacgagcgatcgcccttgatcacttcatccaaaataacaaatgc

SEQ ID NO: 33034 - DNA, 42 bp, Emericella nidulans
gaattcactgcggccgccatgtgtgcctgcaccaccatgctc

SEQ ID NO: 33035 - DNA, 41 bp, Emericella nidulans
gttctcgagacgagcgatcgctccccatctccggcatccct

SEQ ID NO: 33036 - DNA, 44 bp, Emericella nidulans
gaattcactgcggccgccatggctgccctgagcgatagttgcat

SEQ ID NO: 33037 - DNA, 42 bp, Emericella nidulans
gttctcgagacgagcgatcgctcccctcttgcaccagctccc

SEQ ID NO: 33038 - DNA, 43 bp, Emericella nidulans
gaattcactgcggccgccatgggcggttatccgcgtcaactca

SEQ ID NO: 33039 - DNA, 44 bp, Emericella nidulans
gttctcgagacgagcgatcgcgggcaatcaaactggcttggaca

SEQ ID NO: 33040 - DNA, 40 bp, Emericella nidulans
gaattcactgcggccgccatggaggcggcccgcattcaac

SEQ ID NO: 33041 - DNA, 41 bp, Emericella nidulans
gttctcgagacgagcgatcgcctgtcgccacgagcggatga

SEQ ID NO: 33042 - DNA, 42 bp, Emericella nidulans
gaattcactgcggccgccatgtccgatcctgcgtctcaaccc

SEQ ID NO: 33043 - DNA, 45 bp, Emericella nidulans
gttctcgagacgagcgatcgcgcccaagcattcaggaagaataca

SEQ ID NO: 33044 - DNA, 41 bp, Emericella nidulans
gaattcactgcggccgccatgaacggcggcgccacattagg

SEQ ID NO: 33045 - DNA, 42 bp, Emericella nidulans
gttctcgagacgagcgatcgcccccttcccgcgttacaacca

SEQ ID NO: 33046 - DNA, 44 bp, Emericella nidulans
gaattcactgcggccgccatgcagcaacccgagactctccctga

SEQ ID NO: 33047 - DNA, 42 bp, Emericella nidulans
gttctcgagacgagcgatcgcccacccattccgcaaggcaac

SEQ ID NO: 33048 - DNA, 41 bp, Emericella nidulans
gaattcactgcggccgccatgcgccagctgtgcttggggac

SEQ ID NO: 33049 - DNA, 50 bp, Emericella nidulans
gttctcgagacgagcgatcgccgaaagaggaacttcgtcaaagatatgat

SEQ ID NO: 33050 - DNA, 57 bp, Emericella nidulans
gaattcactgcggccgccatgaaatgactacaaatattatcttggggttactgcctc

SEQ ID NO: 33051 - DNA, 48 bp, Emericella nidulans
gttctcgagacgagcgatcgcctcacttgcgaacatgagtaatggaga

SEQ ID NO: 33052 - DNA, 42 bp, Emericella nidulans
gaattcactgcggccgccatgcgcttctgccgtgaatgctca

SEQ ID NO: 33053 - DNA, 48 bp, Emericella nidulans
gttctcgagacgagcgatcgccgtgatatagaatgggcaagaatgaca

SEQ ID NO: 33054 - DNA, 41 bp, Emericella nidulans
gaattcactgcggccgccatgcccaaccgagcccgaaatca

SEQ ID NO: 33055 - DNA, 41 bp, Emericella nidulans
gttctcgagacgagcgatcgcctccaccggctctggaaccc

SEQ ID NO: 33056 - DNA, 43 bp, Emericella nidulans
gaattcactgcggccgccatgccagcttggtgacaaggcccac

SEQ ID NO: 33057 - DNA, 42 bp, Emericella nidulans
gttctcgagacgagcgatcgctgcaaggtcagtgcccgtggt

SEQ ID NO: 33058 - DNA, 44 bp, Emericella nidulans
gaattcactgcggccgccatgtggcggatgtgttttacgccaag

SEQ ID NO: 33059 - DNA, 46 bp, Emericella nidulans
gttctcgagacgagcgatcgcgatccaacctgaacagtcccttcat

SEQ ID NO: 33060 - DNA, 50 bp, Emericella nidulans
gaattcactgcggccgccatgtcctctgaaaggttatacgccttctctcc

SEQ ID NO: 33061 - DNA, 42 bp, Emericella nidulans
gttctcgagacgagcgatcgctccgcactctgcagcttcgac

SEQ ID NO: 33062 - DNA, 52 bp, Emericella nidulans
gaattcactgcggccgccatgttatagtcttctaagtttctgcctccgtgct

SEQ ID NO: 33063 - DNA, 41 bp, Emericella nidulans
gttctcgagacgagcgatcgccgtgctgcgatgggagttgc

SEQ ID NO: 33064 - DNA, 50 bp, Emericella nidulans
gaattcactgcggccgccatgagcccaatcatcacctaagaatgtgatct

SEQ ID NO: 33065 - DNA, 48 bp, Emericella nidulans
gttctcgagacgagcgatcgcaaacattagaacctacgccagaatccc

SEQ ID NO: 33066 - DNA, 48 bp, Emericella nidulans
gaattcactgcggccgccatgacaaatcaaggatatccgtgtggaagg

SEQ ID NO: 33067 - DNA, 49 bp, Emericella nidulans
gttctcgagacgagcgatcgcactggaaacaagggtagagatcttgtcg

SEQ ID NO: 33068 - DNA, 41 bp, Emericella nidulans
gaattcactgcggccgccatgccgaccgtgacccgatccat

SEQ ID NO: 33069 - DNA, 42 bp, Emericella nidulans
gttctcgagacgagcgatcgccgttctcgtcatcggcagtcg

SEQ ID NO: 33070 - DNA, 42 bp, Emericella nidulans
gaattcactgcggccgccatgtgtcgtcaaatcggcgggaag

SEQ ID NO: 33071 - DNA, 42 bp, Emericella nidulans
gttctcgagacgagcgatcgcgggattgccaggcagtcatgg

SEQ ID NO: 33072 - DNA, 41 bp, Emericella nidulans
gaattcactgcggccgccatgccgaagaggccaaacgtgcc

SEQ ID NO: 33073 - DNA, 53 bp, Emericella nidulans
gttctcgagacgagcgatcgcctcgtagtagtcgtctaggacacacctgttga

SEQ ID NO: 33074 - DNA, 41 bp, Emericella nidulans
gaattcactgcggccgccatgaaccgtcctccgccctcgtc

SEQ ID NO: 33075 - DNA, 54 bp, Emericella nidulans
gttctcgagacgagcgatcgcttgactgaagtactcacccgttagaaactcctc

SEQ ID NO: 33076 - DNA, 43 bp, Emericella nidulans
gaattcactgcggccgccatgtctgtttcccacgtgcactgac

SEQ ID NO: 33077 - DNA, 41 bp, Emericella nidulans
gttctcgagacgagcgatcgccctccgcaatcggtcgacaa

SEQ ID NO: 33078 - DNA, 41 bp, Emericella nidulans
gaattcactgcggccgccatgccgccgaggctcatgcttct

SEQ ID NO: 33079 - DNA, 54 bp, Emericella nidulans
gttctcgagacgagcgatcgcctgtagtacgagtctacatcttccagggtacgg

SEQ ID NO: 33080 - DNA, 41 bp, Emericella nidulans
gaattcactgcggccgccatgagccgcctggtatcggctca

SEQ ID NO: 33081 - DNA, 44 bp, Emericella nidulans
gttctcgagacgagcgatcgccagcctcccagagctcaaagctg

SEQ ID NO: 33082 - DNA, 41 bp, Emericella nidulans
gaattcactgcggccgccatggccattgcagcggctttcct

SEQ ID NO: 33083 - DNA, 41 bp, Emericella nidulans
gttctcgagacgagcgatcgcgcgagcggtggttgatgtgg

SEQ ID NO: 33084 - DNA, 42 bp, Emericella nidulans
gaattcactgcggccgccatgtcaggcttgcccctgggattc

SEQ ID NO: 33085 - DNA, 41 bp, Emericella nidulans
gttctcgagacgagcgatcgccccagtgaccgaagcgccac

SEQ ID NO: 33086 - DNA, 41 bp, Emericella nidulans
gaattcactgcggccgccatgtgtccaacgccgccaacatc

SEQ ID NO: 33087 - DNA, 51 bp, Emericella nidulans
gttctcgagacgagcgatcgcaaaaccctcttcaagaccttctgatcttcc

SEQ ID NO: 33088 - DNA, 42 bp, Emericella nidulans
gaattcactgcggccgccatgcgttcctttccggcgatttgc

SEQ ID NO: 33089 - DNA, 41 bp, Emericella nidulans
gttctcgagacgagcgatcgcgggccttgcggatctgagca

SEQ ID NO: 33090 - DNA, 41 bp, Emericella nidulans
gaattcactgcggccgccatgtgacggcgtgctcctcgttg

SEQ ID NO: 33091 - DNA, 47 bp, Emericella nidulans
gttctcgagacgagcgatcgcgccctacctaagcaagctcacactcg

SEQ ID NO: 33092 - DNA, 51 bp, Emericella nidulans
gaattcactgcggccgccatggtcttccagttttcaaaatcgttctctgga

SEQ ID NO: 33093 - DNA, 41 bp, Emericella nidulans
gttctcgagacgagcgatcgcgcgaaggtcgccccctcagt

SEQ ID NO: 33094 - DNA, 41 bp, Emericella nidulans
gaattcactgcggccgccatgtcccaccaagcaaccgctca

SEQ ID NO: 33095 - DNA, 43 bp, Emericella nidulans
gttctcgagacgagcgatcgctgcccatcatcaattgcaaccc

SEQ ID NO: 33096 - DNA, 41 bp, Emericella nidulans
gaattcactgcggccgccatgcgttgtggcgaatgcgatcc

SEQ ID NO: 33097 - DNA, 41 bp, Emericella nidulans
gttctcgagacgagcgatcgccgcgacgacgtcgaggaaga

SEQ ID NO: 33098 - DNA, 48 bp, Emericella nidulans
gaattcactgcggccgccatgagtcgccgtacacatagtgagacaagc

SEQ ID NO: 33099 - DNA, 45 bp, Emericella nidulans
gttctcgagacgagcgatcgcccagggccagcaataagcgtttta

SEQ ID NO: 33100 - DNA, 41 bp, Emericella nidulans
gaattcactgcggccgccatgccaagggagcaccgcttcca

SEQ ID NO: 33101 - DNA, 44 bp, Emericella nidulans
gttctcgagacgagcgatcgcgcttccacgtcgactcgaagaca

SEQ ID NO: 33102 - DNA, 41 bp, Emericella nidulans
gaattcactgcggccgccatgagcgagtcggcgccttccat

SEQ ID NO: 33103 - DNA, 44 bp, Emericella nidulans
gttctcgagacgagcgatcgccgtcaatagctctggcgacgtaa

SEQ ID NO: 33104 - DNA, 47 bp, Emericella nidulans
gaattcactgcggccgccatgtcgacgagcagacgttgcttctaaca

SEQ ID NO: 33105 - DNA, 45 bp, Emericella nidulans
gttctcgagacgagcgatcgcggggtcagtcggtaatgccccata

SEQ ID NO: 33106 - DNA, 41 bp, Emericella nidulans
gaattcactgcggccgccatgtcagctcctcccgctcatgc

SEQ ID NO: 33107 - DNA, 44 bp, Emericella nidulans
gttctcgagacgagcgatcgccccccttccttgacacttctcca

SEQ ID NO: 33108 - DNA, 42 bp, Emericella nidulans
gaattcactgcggccgccatgccctctcggaggaggccttgg

SEQ ID NO: 33109 - DNA, 51 bp, Emericella nidulans
gttctcgagacgagcgatcgccatcaaagtccgcaaacttacacttcaaca

SEQ ID NO: 33110 - DNA, 40 bp, Emericella nidulans
gaattcactgcggccgccatgaccaccgcagccgccaaag

SEQ ID NO: 33111 - DNA, 43 bp, Emericella nidulans
gttctcgagacgagcgatcgctctccaactcggcttcctcgtc

SEQ ID NO: 33112 - DNA, 44 bp, Emericella nidulans
gaattcactgcggccgccatgcgccgaatattcaaggcaggagc

SEQ ID NO: 33113 - DNA, 47 bp, Emericella nidulans
gttctcgagacgagcgatcgccgtttcttcttgtctttggccggagt

SEQ ID NO: 33114 - DNA, 41 bp, Emericella nidulans
gaattcactgcggccgccatggcgaccttggtgccgttcca

SEQ ID NO: 33115 - DNA, 45 bp, Emericella nidulans
gttctcgagacgagcgatcgcgcccgtagataatggcgtcgacaa

SEQ ID NO: 33116 - DNA, 51 bp, Emericella nidulans
gaattcactgcggccgccatgcaaagggctgtgtgatgtatttgttaatgc

SEQ ID NO: 33117 - DNA, 41 bp, Emericella nidulans
gttctcgagacgagcgatcgcccatgcgcgacgaaagcgta

SEQ ID NO: 33118 - DNA, 41 bp, Emericella nidulans
gaattcactgcggccgccatggccgaagaggagaccgagcc

SEQ ID NO: 33119 - DNA, 41 bp, Emericella nidulans
gttctcgagacgagcgatcgcaacgcgttggcgggaacact

SEQ ID NO: 33120 - DNA, 57 bp, Emericella nidulans
gaattcactgcggccgccatgatctagtagcttattaggaagtctttatggcagaga

SEQ ID NO: 33121 - DNA, 55 bp, Emericella nidulans
gttctcgagacgagcgatcgcatgtttaggacagctggttctcttatgcccctga

SEQ ID NO: 33122 - DNA, 42 bp, Emericella nidulans
gaattcactgcggccgccatgcgcagagtatcccccgctggt

SEQ ID NO: 33123 - DNA, 41 bp, Emericella nidulans
gttctcgagacgagcgatcgcccactgcaaacgccgaaacg

SEQ ID NO: 33124 - DNA, 43 bp, Emericella nidulans
gaattcactgcggccgccatgggacgcatcgctttctgtgtcg

SEQ ID NO: 33125 - DNA, 43 bp, Emericella nidulans
gttctcgagacgagcgatcgccccatcatgatcgccaaggtcc

SEQ ID NO: 33126 - DNA, 41 bp, Emericella nidulans
gaattcactgcggccgccatgtcgatggcttgcgctctgct

SEQ ID NO: 33127 - DNA, 53 bp, Emericella nidulans
gttctcgagacgagcgatcgcccgtgatataatctttgttttcgattgtcacg

SEQ ID NO: 33128 - DNA, 42 bp, Emericella nidulans
gaattcactgcggccgccatgcctggagggtcgcacagagca

SEQ ID NO: 33129 - DNA, 53 bp, Emericella nidulans
gttctcgagacgagcgatcgcaggaatatttacgtttatttgcctgccagctt

SEQ ID NO: 33130 - DNA, 41 bp, Emericella nidulans
gaattcactgcggccgccatgccccgctggctgtcactgct

SEQ ID NO: 33131 - DNA, 55 bp, Emericella nidulans
gttctcgagacgagcgatcgctcagatcccttagaactggatatttttagcatcc

SEQ ID NO: 33132 - DNA, 45 bp, Emericella nidulans
gaattcactgcggccgccatgggctcagcttgatcttgctgttga

SEQ ID NO: 33133 - DNA, 41 bp, Emericella nidulans
gttctcgagacgagcgatcgccgaattggcccacgcactga

SEQ ID NO: 33134 - DNA, 40 bp, Emericella nidulans
gaattcactgcggccgccatgcccggccgtttcgacaaga

SEQ ID NO: 33135 - DNA, 43 bp, Emericella nidulans
gttctcgagacgagcgatcgcgccgccatttgtgacagggtct

SEQ ID NO: 33136 - DNA, 42 bp, Emericella nidulans
gaattcactgcggccgccatgtgctggatgctcaagcgcaga

SEQ ID NO: 33137 - DNA, 52 bp, Emericella nidulans
gttctcgagacgagcgatcgcaatttatccgtcacaacatcacacagatcca

SEQ ID NO: 33138 - DNA, 41 bp, Emericella nidulans
gaattcactgcggccgccatgtgggctctcgttccccgttg

SEQ ID NO: 33139 - DNA, 44 bp, Emericella nidulans
gttctcgagacgagcgatcgcggggcgagcttttctctccgagt

SEQ ID NO: 33140 - DNA, 42 bp, Emericella nidulans
gaattcactgcggccgccatgtgctggccgggctagctccta

SEQ ID NO: 33141 - DNA, 51 bp, Emericella nidulans
gttctcgagacgagcgatcgcatgaatccaagtctcaaagtactcgcagtt

SEQ ID NO: 33142 - DNA, 42 bp, Emericella nidulans
gaattcactgcggccgccatggcagcgtcgccctcttgtacc

SEQ ID NO: 33143 - DNA, 57 bp, Emericella nidulans
gttctcgagacgagcgatcgcactatactgtgcaaacttgcttctttggcgaagact

SEQ ID NO: 33144 - DNA, 45 bp, Emericella nidulans
gaattcactgcggccgccatgggagagctgtacaagcacctacgc

SEQ ID NO: 33145 - DNA, 47 bp, Emericella nidulans
gttctcgagacgagcgatcgcgatggtccgatcatctttgacgcagt

SEQ ID NO: 33146 - DNA, 41 bp, Emericella nidulans
gaattcactgcggccgccatgggcgagaagggcttgggagc

SEQ ID NO: 33147 - DNA, 42 bp, Emericella nidulans
gttctcgagacgagcgatcgcccctcaggaggctgaggaagc

SEQ ID NO: 33148 - DNA, 41 bp, Emericella nidulans
gaattcactgcggccgccatgtccgctcgcgctaccttttt

SEQ ID NO: 33149 - DNA, 46 bp, Emericella nidulans
gttctcgagacgagcgatcgcgctgcgagtttcgtatcagcaaaca

SEQ ID NO: 33150 - DNA, 41 bp, Emericella nidulans
gaattcactgcggccgccatggcgcgtcctgcgacaattca

SEQ ID NO: 33151 - DNA, 41 bp, Emericella nidulans
gttctcgagacgagcgatcgcccttccacgggcttcaccca

SEQ ID NO: 33152 - DNA, 43 bp, Emericella nidulans
gaattcactgcggccgccatggccaccacaccatatttgacga

SEQ ID NO: 33153 - DNA, 49 bp, Emericella nidulans
gttctcgagacgagcgatcgcggatagtaccacgtggtaacggcgataa

SEQ ID NO: 33154 - DNA, 55 bp, Emericella nidulans
gaattcactgcggccgccatgcttattacctcagtctcatctctactcgcctcgt

SEQ ID NO: 33155 - DNA, 41 bp, Emericella nidulans
gttctcgagacgagcgatcgcgggcaatgcaggggagcgta

SEQ ID NO: 33156 - DNA, 41 bp, Emericella nidulans
gaattcactgcggccgccatgaccatgtgcgcagcacccac

SEQ ID NO: 33157 - DNA, 43 bp, Emericella nidulans
gttctcgagacgagcgatcgccgacccttgcttcgcacatacg

SEQ ID NO: 33158 - DNA, 53 bp, Emericella nidulans
gaattcactgcggccgccatgagtagaagaaggactcaatcatcttccggttg

SEQ ID NO: 33159 - DNA, 41 bp, Emericella nidulans
gttctcgagacgagcgatcgcgtcgccaaagtccccgaggc

SEQ ID NO: 33160 - DNA, 41 bp, Emericella nidulans
gaattcactgcggccgccatgcgcgccacccctccatactg

SEQ ID NO: 33161 - DNA, 44 bp, Emericella nidulans
gttctcgagacgagcgatcgccaatcgttgagaccagcgcgatt

SEQ ID NO: 33162 - DNA, 41 bp, Emericella nidulans
gaattcactgcggccgccatgcaggctctggcggagcaagc

SEQ ID NO: 33163 - DNA, 46 bp, Emericella nidulans
gttctcgagacgagcgatcgcggctgaggctagtgatggctttcca

SEQ ID NO: 33164 - DNA, 43 bp, Emericella nidulans
gaattcactgcggccgccatgccgcaacacccgtatgctttca

SEQ ID NO: 33165 - DNA, 44 bp, Emericella nidulans
gttctcgagacgagcgatcgcgccctgcttctgcgcgaataaaa

SEQ ID NO: 33166 - DNA, 41 bp, Emericella nidulans
gaattcactgcggccgccatgggggctccgcagacggactt

SEQ ID NO: 33167 - DNA, 41 bp, Emericella nidulans
gttctcgagacgagcgatcgcggtggcggtgcgttgtgtgt

SEQ ID NO: 33168 - DNA, 53 bp, Emericella nidulans
gaattcactgcggccgccatgtgcaacaaaacagacactctttttatcctcgt

SEQ ID NO: 33169 - DNA, 40 bp, Emericella nidulans
gttctcgagacgagcgatcgccgccgcgagcggaataagg

SEQ ID NO: 33170 - DNA, 49 bp, Emericella nidulans
gaattcactgcggccgccatgaacgtcgccatagctatatacacgactc

SEQ ID NO: 33171 - DNA, 41 bp, Emericella nidulans
gttctcgagacgagcgatcgcctgccaggcctgctgtttcg

SEQ ID NO: 33172 - DNA, 41 bp, Emericella nidulans
gaattcactgcggccgccatgtcttgccaacaagccaccca

SEQ ID NO: 33173 - DNA, 44 bp, Emericella nidulans
gttctcgagacgagcgatcgccacccacatgatggatccccaac

SEQ ID NO: 33174 - DNA, 41 bp, Emericella nidulans
gaattcactgcggccgccatgccgcaagttcctgcggctga

SEQ ID NO: 33175 - DNA, 41 bp, Emericella nidulans
gttctcgagacgagcgatcgcgctgggcacgagcctcctct

SEQ ID NO: 33176 - DNA, 41 bp, Emericella nidulans
gaattcactgcggccgccatgcgcatccgccggagaaacag

SEQ ID NO: 33177 - DNA, 41 bp, Emericella nidulans
gttctcgagacgagcgatcgcctctctcggtcgcgcagcac

SEQ ID NO: 33178 - DNA, 41 bp, Emericella nidulans
gaattcactgcggccgccatggcgtcggtgcactgcccttt

SEQ ID NO: 33179 - DNA, 41 bp, Emericella nidulans
gttctcgagacgagcgatcgctgcggaccctctcgccgtag

SEQ ID NO: 33180 - DNA, 42 bp, Emericella nidulans
gaattcactgcggccgccatgtggagcagtgagtgggcacga

SEQ ID NO: 33181 - DNA, 43 bp, Emericella nidulans
gttctcgagacgagcgatcgcgctgcttgttggggcaattgaa

SEQ ID NO: 33182 - DNA, 49 bp, Emericella nidulans
gaattcactgcggccgccatgagaaaagctgtacgttttctagccacga

SEQ ID NO: 33183 - DNA, 50 bp, Emericella nidulans
gttctcgagacgagcgatcgccttctcatctaaccaacgctctggaatga

SEQ ID NO: 33184 - DNA, 43 bp, Emericella nidulans
gaattcactgcggccgccatgggacgccaccttgaaccttgga

SEQ ID NO: 33185 - DNA, 45 bp, Emericella nidulans
gttctcgagacgagcgatcgcgcatccgttgaggcagtgaagaca

SEQ ID NO: 33186 - DNA, 41 bp, Emericella nidulans
gaattcactgcggccgccatgtccctggcactgctccaccc

SEQ ID NO: 33187 - DNA, 42 bp, Emericella nidulans
gttctcgagacgagcgatcgctgctcggtgcagcaacaacat

SEQ ID NO: 33188 - DNA, 41 bp, Emericella nidulans
gaattcactgcggccgccatggagatgcgcgcttcggacaa

SEQ ID NO: 33189 - DNA, 50 bp, Emericella nidulans
gttctcgagacgagcgatcgcattccctgttggcttgtataaaatggttg

SEQ ID NO: 33190 - DNA, 43 bp, Emericella nidulans
gaattcactgcggccgccatgccagaatctgctctcgccacca

SEQ ID NO: 33191 - DNA, 45 bp, Emericella nidulans
gttctcgagacgagcgatcgctcctcccatcatacctcccatctg

SEQ ID NO: 33192 - DNA, 45 bp, Emericella nidulans
gaattcactgcggccgccatgccgggtttcgatcgattctccttc

SEQ ID NO: 33193 - DNA, 43 bp, Emericella nidulans
gttctcgagacgagcgatcgccctgctcttcgcggatcaggtt

SEQ ID NO: 33194 - DNA, 40 bp, Emericella nidulans; identical to SEQ ID NO: 33110

SEQ ID NO: 33195 - DNA, 44 bp, Emericella nidulans
gttctcgagacgagcgatcgcgccatttccgcgcgtaacttctc

SEQ ID NO: 33196 - DNA, 41 bp, Emericella nidulans
gaattcactgcggccgccatgcgctccgggtctgcaggtgt

SEQ ID NO: 33197 - DNA, 53 bp, Emericella nidulans
gttctcgagacgagcgatcgctagatatgccctggtattctcatacatcaaga

SEQ ID NO: 33198 - DNA, 42 bp, Emericella nidulans
gaattcactgcggccgccatgcgccaactatcgcgaggatgc

SEQ ID NO: 33199 - DNA, 41 bp, Emericella nidulans
gttctcgagacgagcgatcgcagcgaggttggcggacgatg

SEQ ID NO: 33200 - DNA, 40 bp, Emericella nidulans
gaattcactgcggccgccatgggcacgctgtggtgggctc

SEQ ID NO: 33201 - DNA, 48 bp, Emericella nidulans
gttctcgagacgagcgatcgccacgaatcttcttcttctttccatccc

SEQ ID NO: 33202 - DNA, 41 bp, Emericella nidulans
gaattcactgcggccgccatgctggcgggacacgagaaccc

SEQ ID NO: 33203 - DNA, 41 bp, Emericella nidulans
gttctcgagacgagcgatcgcaacggcccggctggtgtcat

SEQ ID NO: 33204 - DNA, 46 bp, Emericella nidulans
gaattcactgcggccgccatggctgtgcaaggcttcgatatctccc

SEQ ID NO: 33205 - DNA, 41 bp, Emericella nidulans
gttctcgagacgagcgatcgcccgagtccccgccaaactca

SEQ ID NO: 33206 - DNA, 42 bp, Emericella nidulans
gaattcactgcggccgccatggatcgaaccaaaggccgaccc

SEQ ID NO: 33207 - DNA, 57 bp, Emericella nidulans
gttctcgagacgagcgatcgctttcccaggttacgcataatattgtacccgtaggtc

SEQ ID NO: 33208 - DNA, 41 bp, Emericella nidulans
gaattcactgcggccgccatgctctcgggcttgcccatcgt

SEQ ID NO: 33209 - DNA, 43 bp, Emericella nidulans
gttctcgagacgagcgatcgcgcacgcaccttgctgtgcgata

SEQ ID NO: 33210 - DNA, 41 bp, Emericella nidulans
gaattcactgcggccgccatggtcggccgatgacggctctc

SEQ ID NO: 33211 - DNA, 41 bp, Emericella nidulans
gttctcgagacgagcgatcgctcgcaatccctccgccagac

SEQ ID NO: 33212 - DNA, 41 bp, Emericella nidulans
gaattcactgcggccgccatggcgtcaacgggcgacacaag

SEQ ID NO: 33213 - DNA, 41 bp, Emericella nidulans
gttctcgagacgagcgatcgcaggcggcttgcagcttggag

SEQ ID NO: 33214 - DNA, 42 bp, Emericella nidulans
gaattcactgcggccgccatgcgtccgccgctaccagtctcc

SEQ ID NO: 33215 - DNA, 52 bp, Emericella nidulans
gttctcgagacgagcgatcgccttaaggcgttgcatcaggtactctacttcg

SEQ ID NO: 33216 - DNA, 45 bp, Emericella nidulans
gaattcactgcggccgccatgctctcgctcttccatttcctggag

SEQ ID NO: 33217 - DNA, 43 bp, Emericella nidulans
gttctcgagacgagcgatcgccctgggatcccaatgatggtcc

SEQ ID NO: 33218 - DNA, 41 bp, Emericella nidulans
gaattcactgcggccgccatggccctccatcgtgcacagca

SEQ ID NO: 33219 - DNA, 54 bp, Emericella nidulans
gttctcgagacgagcgatcgcagcgtgaacctaaaagtatcaacaactatttca

SEQ ID NO: 33220 - DNA, 45 bp, Emericella nidulans
gaattcactgcggccgccatgtcaatcaagtcgtacgaccgagcc

SEQ ID NO: 33221 - DNA, 47 bp, Emericella nidulans
gttctcgagacgagcgatcgctctcgtcccatacggtgtaataatgg

SEQ ID NO: 33222 - DNA, 43 bp, Emericella nidulans
gaattcactgcggccgccatgagcaagaccttcaccgccagca

SEQ ID NO: 33223 - DNA, 46 bp, Emericella nidulans
gttctcgagacgagcgatcgccagcagaagcataccaagaccagca

SEQ ID NO: 33224 - DNA, 45 bp, Emericella nidulans
gaattcactgcggccgccatgtgcagaagctgcgaaggactacca

SEQ ID NO: 33225 - DNA, 41 bp, Emericella nidulans
gttctcgagacgagcgatcgcgcgcggcaagctgtgggtat

SEQ ID NO: 33226 - DNA, 41 bp, Emericella nidulans
gaattcactgcggccgccatgctcaggcgtcccgcaatcgt

SEQ ID NO: 33227 - DNA, 41 bp, Emericella nidulans
gttctcgagacgagcgatcgcagcccgagagcccggacatt

SEQ ID NO: 33228 - DNA, 42 bp, Emericella nidulans
gaattcactgcggccgccatgtccctacgcctcaaccaggga

SEQ ID NO: 33229 - DNA, 41 bp, Emericella nidulans
gttctcgagacgagcgatcgccgcggcctcccgaatgtaga

SEQ ID NO: 33230 - DNA, 40 bp, Emericella nidulans
gaattcactgcggccgccatggtgccaagcgcgcccacta

SEQ ID NO: 33231 - DNA, 41 bp, Emericella nidulans
gttctcgagacgagcgatcgctgcggatggcacgctggtag

SEQ ID NO: 33232 - DNA, 41 bp, Emericella nidulans
gaattcactgcggccgccatgtcgcagggcagccagacctt

SEQ ID NO: 33233 - DNA, 42 bp, Emericella nidulans
gttctcgagacgagcgatcgctgtccacgtcggtcacgcaag

SEQ ID NO: 33234 - DNA, 41 bp, Emericella nidulans
gaattcactgcggccgccatgtgccgacgaccgcatcgtta

SEQ ID NO: 33235 - DNA, 43 bp, Emericella nidulans
gttctcgagacgagcgatcgccgtcagcccagattcagccaca

SEQ ID NO: 33236 - DNA, 45 bp, Emericella nidulans
gaattcactgcggccgccatgtgcaggccatgaagaatgcacttg

SEQ ID NO: 33237 - DNA, 47 bp, Emericella nidulans
gttctcgagacgagcgatcgcaagacctgtaacaaatcagtcggtgc

SEQ ID NO: 33238 - DNA, 48 bp, Emericella nidulans
gaattcactgcggccgccatgggcgacataaggcttatcgtctcagat

SEQ ID NO: 33239 - DNA, 41 bp, Emericella nidulans
gttctcgagacgagcgatcgcgccgcaacaaccctcctcca

SEQ ID NO: 33240 - DNA, 41 bp, Emericella nidulans
gaattcactgcggccgccatgcccgccttcaacggaaccct

SEQ ID NO: 33241 - DNA, 48 bp, Emericella nidulans
gttctcgagacgagcgatcgcgatcaaaaggtttacccaatggcaggt

SEQ ID NO: 33242 - DNA, 45 bp, Emericella nidulans
gaattcactgcggccgccatgtcgaacacgcgacaatcaatagcg

SEQ ID NO: 33243 - DNA, 44 bp, Emericella nidulans
gttctcgagacgagcgatcgcttcagccatggatgctcgctcag

SEQ ID NO: 33244 - DNA, 41 bp, Emericella nidulans
gaattcactgcggccgccatgttggtgctggcgctttccac

SEQ ID NO: 33245 - DNA, 48 bp, Emericella nidulans
gttctcgagacgagcgatcgcccacaatctttacgaagcaactctcaa

SEQ ID NO: 33246 - DNA, 53 bp, Emericella nidulans
gaattcactgcggccgccatgaaagctaacctgacagtaagtgggttacacaa

SEQ ID NO: 33247 - DNA, 41 bp, Emericella nidulans
gttctcgagacgagcgatcgccgccagctggtccgcttcag

SEQ ID NO: 33248 - DNA, 52 bp, Emericella nidulans
gaattcactgcggccgccatgagttactggctggatgactataacccatgtc

SEQ ID NO: 33249 - DNA, 42 bp, Emericella nidulans
gttctcgagacgagcgatcgccaggctgctgtgatggcctcc

SEQ ID NO: 33250 - DNA, 41 bp, Emericella nidulans
gaattcactgcggccgccatggcgagcctggccgtgagaaa

SEQ ID NO: 33251 - DNA, 42 bp, Emericella nidulans
gttctcgagacgagcgatcgccagtcgacagcccagccgttc

SEQ ID NO: 33252 - DNA, 41 bp, Emericella nidulans
gaattcactgcggccgccatgggtcgctcaaatgcggacct

SEQ ID NO: 33253 - DNA, 44 bp, Emericella nidulans
gttctcgagacgagcgatcgctgaatcactccaacatcgccacc

SEQ ID NO: 33254 - DNA, 42 bp, Emericella nidulans
gaattcactgcggccgccatgccacacgccagcagacacagc

SEQ ID NO: 33255 - DNA, 57 bp, Emericella nidulans
gttctcgagacgagcgatcgccttcttctctctgagacctttgagatatgcaaataa

SEQ ID NO: 33256 - DNA, 43 bp, Emericella nidulans
gaattcactgcggccgccatggcatgctggcccgtcagttaca

SEQ ID NO: 33257 - DNA, 41 bp, Emericella nidulans
gttctcgagacgagcgatcgccacttgcggacgcgcctctt

SEQ ID NO: 33258 - DNA, 41 bp, Emericella nidulans
gaattcactgcggccgccatgccctgatgcggtccagagca

SEQ ID NO: 33259 - DNA, 44 bp, Emericella nidulans
gttctcgagacgagcgatcgcccatcaatcagcacatcgctccc

SEQ ID NO: 33260 - DNA, 41 bp, Emericella nidulans
gaattcactgcggccgccatgcattcctccggccgaagcct

SEQ ID NO: 33261 - DNA, 42 bp, Emericella nidulans
gttctcgagacgagcgatcgccagcagcagcagcttcccgta

SEQ ID NO: 33262 - DNA, 53 bp, Emericella nidulans
gaattcactgcggccgccatgatcacaagaatgagtaaactaacatttgaggc

SEQ ID NO: 33263 - DNA, 49 bp, Emericella nidulans
gttctcgagacgagcgatcgccatctctccgcactggatgattacaaca

SEQ ID NO: 33264 - DNA, 50 bp, Emericella nidulans
gaattcactgcggccgccatgcagttccctttagagcaatggttttatga

SEQ ID NO: 33265 - DNA, 51 bp, Emericella nidulans
gttctcgagacgagcgatcgcagacggataaacgtcattgaagaagtacca

SEQ ID NO: 33266 - DNA, 41 bp, Emericella nidulans
gaattcactgcggccgccatgaatcgccaacgccgagggtc

SEQ ID NO: 33267 - DNA, 41 bp, Emericella nidulans
gttctcgagacgagcgatcgccgcaggtcgcttccggtcat

SEQ ID NO: 33268 - DNA, 41 bp, Emericella nidulans
gaattcactgcggccgccatgttgtgcacgggcacctacgc

SEQ ID NO: 33269 - DNA, 41 bp, Emericella nidulans
gttctcgagacgagcgatcgccctcagcccgctcacggttg

SEQ ID NO: 33270 - DNA, 46 bp, Emericella nidulans
gaattcactgcggccgccatgtcatctttcaggtgagccctttgtg

SEQ ID NO: 33271 - DNA, 42 bp, Emericella nidulans
gttctcgagacgagcgatcgcgcttggccaacgacagcaacc

SEQ ID NO: 33272 - DNA, 41 bp, Emericella nidulans
gaattcactgcggccgccatggcgcgtccgcaagcacagat

SEQ ID NO: 33273 - DNA, 44 bp, Emericella nidulans
gttctcgagacgagcgatcgctcatttgatgaagctgcgccttt

SEQ ID NO: 33274 - DNA, 42 bp, Emericella nidulans
gaattcactgcggccgccatgcgcccaaccctacatcgaccc

SEQ ID NO: 33275 - DNA, 41 bp, Emericella nidulans
gttctcgagacgagcgatcgctccgcaaccagcctcatccc

SEQ ID NO: 33276 - DNA, 41 bp, Emericella nidulans
gaattcactgcggccgccatgtgcccccaaccttgctgctc

SEQ ID NO: 33277 - DNA, 41 bp, Emericella nidulans
gttctcgagacgagcgatcgcctcgccgccctcagacttgc

SEQ ID NO: 33278 - DNA, 41 bp, Emericella nidulans
gaattcactgcggccgccatggcgcgctccaggaccctctt

SEQ ID NO: 33279 - DNA, 41 bp, Emericella nidulans
gttctcgagacgagcgatcgctccccgacagcgagacgaca

SEQ ID NO: 33280 - DNA, 41 bp, Emericella nidulans
gaattcactgcggccgccatgtcagtggtcgggcgcaaatg

SEQ ID NO: 33281 - DNA, 41 bp, Emericella nidulans
gttctcgagacgagcgatcgccgcccggtggtatcctgcac

SEQ ID NO: 33282 - DNA, 45 bp, Emericella nidulans
gaattcactgcggccgccatgccaacgccaaaactagcccattca

SEQ ID NO: 33283 - DNA, 42 bp, Emericella nidulans
gttctcgagacgagcgatcgccccatccatcccccatcaacg

SEQ ID NO: 33284 - DNA, 41 bp, Emericella nidulans
gaattcactgcggccgccatgctggacgtgccctgccgaat

SEQ ID NO: 33285 - DNA, 42 bp, Emericella nidulans
gttctcgagacgagcgatcgctcagtgctggccaaagggtcc

SEQ ID NO: 33286 - DNA, 44 bp, Emericella nidulans
gaattcactgcggccgccatgccgactccagacacctcgcatgt

SEQ ID NO: 33287 - DNA, 41 bp, Emericella nidulans
gttctcgagacgagcgatcgcgcgatccggatccagcacct

SEQ ID NO: 33288 - DNA, 41 bp, Emericella nidulans
gaattcactgcggccgccatggcccacgccctccgtcaaat

SEQ ID NO: 33289 - DNA, 41 bp, Emericella nidulans
gttctcgagacgagcgatcgctcggtgttggggtgagtccc

SEQ ID NO: 33290 - DNA, 55 bp, Emericella nidulans
gaattcactgcggccgccatggttttatcatttatacttgttcagaaccgtcagt

SEQ ID NO: 33291 - DNA, 42 bp, Emericella nidulans
gttctcgagacgagcgatcgctccccggcaaggaaaacttcg

SEQ ID NO: 33292 - DNA, 53 bp, Emericella nidulans
gaattcactgcggccgccatgaaattgctgctaactcgtaatctaacagtcac

SEQ ID NO: 33293 - DNA, 49 bp, Emericella nidulans
gttctcgagacgagcgatcgccggcaaagtttcaatattttcaacaaca

SEQ ID NO: 33294 - DNA, 41 bp, Emericella nidulans
gaattcactgcggccgccatgcgaagtccgcgacctggacc

SEQ ID NO: 33295 - DNA, 41 bp, Emericella nidulans
gttctcgagacgagcgatcgcgcgcaatgagccgttccaca

SEQ ID NO: 33296 - DNA, 41 bp, Emericella nidulans
gaattcactgcggccgccatggacagctcgtccgcccatcc

SEQ ID NO: 33297 - DNA, 41 bp, Emericella nidulans
gttctcgagacgagcgatcgcccttggcaccgacggcctta

SEQ ID NO: 33298 - DNA, 41 bp, Emericella nidulans
gaattcactgcggccgccatgcgggcggacatccgacacat

SEQ ID NO: 33299 - DNA, 41 bp, Emericella nidulans; identical to SEQ ID NO: 32753

SEQ ID NO: 33300 - DNA, 46 bp, Emericella nidulans
gaattcactgcggccgccatgggagcaggccttatctcctcctggt

SEQ ID NO: 33301 - DNA, 41 bp, Emericella nidulans
gttctcgagacgagcgatcgctgcgctgcaaccactcttgg

SEQ ID NO: 33302 - DNA, 43 bp, Emericella nidulans
gaattcactgcggccgccatgggcccggaacgtcaatatggtg

SEQ ID NO: 33303 - DNA, 42 bp, Emericella nidulans
gttctcgagacgagcgatcgcgcacaccatcagcccgggaat

SEQ ID NO: 33304 - DNA, 41 bp, Emericella nidulans
gaattcactgcggccgccatgcagacctgacggcacgcacc

SEQ ID NO: 33305 - DNA, 43 bp, Emericella nidulans
gttctcgagacgagcgatcgccgatttcggcaatcacgttgct

SEQ ID NO: 33306 - DNA, 42 bp, Emericella nidulans
gaattcactgcggccgccatgcttcggcgactgacggtatga

SEQ ID NO: 33307 - DNA, 44 bp, Emericella nidulans
gttctcgagacgagcgatcgctcatccaggcctcgtaaagtggg

SEQ ID NO: 33308 - DNA, 41 bp, Emericella nidulans
gaattcactgcggccgccatgctgcgaacgctggagcaacg

SEQ ID NO: 33309 - DNA, 53 bp, Emericella nidulans
gttctcgagacgagcgatcgcgatatccacagatacgctaattgtgtcagacg

SEQ ID NO: 33310 - DNA, 41 bp, Emericella nidulans
gaattcactgcggccgccatgcctccctctccacggcacca

SEQ ID NO: 33311 - DNA, 41 bp, Emericella nidulans
gttctcgagacgagcgatcgccccagccctgtttcccaacc

SEQ ID NO: 33312 - DNA, 41 bp, Emericella nidulans
gaattcactgcggccgccatgctcgcccgtgggatgaacca

SEQ ID NO: 33313 - DNA, 52 bp, Emericella nidulans
gttctcgagacgagcgatcgcactcccacatcaactttgtagagatgccctc

SEQ ID NO: 33314 - DNA, 43 bp, Emericella nidulans
gaattcactgcggccgccatggtcaggctgcaacatgtcggta

SEQ ID NO: 33315 - DNA, 41 bp, Emericella nidulans
gttctcgagacgagcgatcgccgggctaggactgcggctga

SEQ ID NO: 33316 - DNA, 47 bp, Emericella nidulans
gaattcactgcggccgccatgcagcctctgttgtcctgtttgggaac

SEQ ID NO: 33317 - DNA, 42 bp, Emericella nidulans
gttctcgagacgagcgatcgcgacccgggcccatgtattgga

SEQ ID NO: 33318 - DNA, 45 bp, Emericella nidulans
gaattcactgcggccgccatgcaacaccgcgtatttgtagtcgaa

SEQ ID NO: 33319 - DNA, 41 bp, Emericella nidulans
gttctcgagacgagcgatcgcgctctgccactggcgcgttt

SEQ ID NO: 33320 - DNA, 48 bp, Emericella nidulans
gaattcactgcggccgccatgcaccgagcaaatctacgacatcttcca

SEQ ID NO: 33321 - DNA, 44 bp, Emericella nidulans
gttctcgagacgagcgatcgcggtcagcaacgttcatgggcatc

SEQ ID NO: 33322 - DNA, 41 bp, Emericella nidulans
gaattcactgcggccgccatgatggccgacatcctcaccca

SEQ ID NO: 33323 - DNA, 46 bp, Emericella nidulans
gttctcgagacgagcgatcgccccaaaacctcttctaccctcctcc

SEQ ID NO: 33324 - DNA, 45 bp, Emericella nidulans
gaattcactgcggccgccatgtcagccgatccgaactacaagcct

SEQ ID NO: 33325 - DNA, 42 bp, Emericella nidulans
gttctcgagacgagcgatcgcccgcatggaaaccattggcac

SEQ ID NO: 33326 - DNA, 46 bp, Emericella nidulans
gaattcactgcggccgccatgtccgctgttgccagtaatgatgagg

SEQ ID NO: 33327 - DNA, 41 bp, Emericella nidulans
gttctcgagacgagcgatcgcctcgctgcccactgtgaggg

SEQ ID NO: 33328 - DNA, 41 bp, Emericella nidulans
gaattcactgcggccgccatgaagaaggccgcgaacgcaaa

SEQ ID NO: 33329 - DNA, 41 bp, Emericella nidulans
gttctcgagacgagcgatcgctcctcgaacccgtccgtcgt

SEQ ID NO: 33330 - DNA, 45 bp, Emericella nidulans
gaattcactgcggccgccatgtgcgttgattgaggtcaccgaaaa

SEQ ID NO: 33331 - DNA, 42 bp, Emericella nidulans
gttctcgagacgagcgatcgcgccctctagcgctggcgtttc

SEQ ID NO: 33332 - DNA, 45 bp, Emericella nidulans; identical to SEQ ID NO: 33330

SEQ ID NO: 33333 - DNA, 42 bp, Emericella nidulans; identical to SEQ ID NO: 33331

SEQ ID NO: 33334 - DNA, 44 bp, Emericella nidulans
gaattcactgcggccgccatgtcgcctaacatgccctgattcca

SEQ ID NO: 33335 - DNA, 41 bp, Emericella nidulans
gttctcgagacgagcgatcgccgaagcaacgccatcgctct

SEQ ID NO: 33336 - DNA, 57 bp, Emericella nidulans
gaattcactgcggccgccatgagtagtgtttctcgtgatgctaacaataattctaca

SEQ ID NO: 33337 - DNA, 41 bp, Emericella nidulans
gttctcgagacgagcgatcgcttggccaaccatgggagggt

SEQ ID NO: 33338 - DNA, 41 bp, Emericella nidulans
gaattcactgcggccgccatgttctgcgaagcgccatctcg

SEQ ID NO: 33339 - DNA, 41 bp, Emericella nidulans
gttctcgagacgagcgatcgccccaaccctgccgcctgttt

SEQ ID NO: 33340 - DNA, 43 bp, Emericella nidulans
gaattcactgcggccgccatgtctccttcgacctctcccttgc

SEQ ID NO: 33341 - DNA, 55 bp, Emericella nidulans
gttctcgagacgagcgatcgcaattttgtttagcttcttcttgatctcttccaca

SEQ ID NO: 33342 - DNA, 41 bp, Emericella nidulans
gaattcactgcggccgccatggggaggatggggcggtcgta

SEQ ID NO: 33343 - DNA, 41 bp, Emericella nidulans
gttctcgagacgagcgatcgcgtctgccacccgaccgcaat

SEQ ID NO: 33344 - DNA, 52 bp, Emericella nidulans
gaattcactgcggccgccatgaagttctttggttatgagatggagtcgctga

SEQ ID NO: 33345 - DNA, 41 bp, Emericella nidulans
gttctcgagacgagcgatcgcgcaacccagtccaagcgtga

SEQ ID NO: 33346 - DNA, 43 bp, Emericella nidulans
gaattcactgcggccgccatgcagactggacgtccaccgacga

SEQ ID NO: 33347 - DNA, 44 bp, Emericella nidulans
gttctcgagacgagcgatcgcgctgccatagtcaggcgcctctt

SEQ ID NO: 33348 - DNA, 52 bp, Emericella nidulans
gaattcactgcggccgccatgtttagacgtcttaactgcaatatgtcgcacc

SEQ ID NO: 33349 - DNA, 43 bp, Emericella nidulans
gttctcgagacgagcgatcgccgccttcagcgctaactcaccc

SEQ ID NO: 33350 - DNA, 42 bp, Emericella nidulans
gaattcactgcggccgccatgtgcccaaaactcccacgctta

SEQ ID NO: 33351 - DNA, 49 bp, Emericella nidulans
gttctcgagacgagcgatcgcttcctgcactacatcatcaaattccttg

SEQ ID NO: 33352 - DNA, 42 bp, Emericella nidulans
gaattcactgcggccgccatggcaacccttcgacccagccac

SEQ ID NO: 33353 - DNA, 41 bp, Emericella nidulans
gttctcgagacgagcgatcgcgcgcaactccgccaatcgtt

SEQ ID NO: 33354 - DNA, 41 bp, Emericella nidulans
gaattcactgcggccgccatgtctttcatacgcccggtggc

SEQ ID NO: 33355 - DNA, 45 bp, Emericella nidulans
gttctcgagacgagcgatcgcccgggtcttgtattccctcggact

SEQ ID NO: 33356 - DNA, 42 bp, Emericella nidulans
gaattcactgcggccgccatgtgcagcagcggaattgggaag

SEQ ID NO: 33357 - DNA, 54 bp, Emericella nidulans
gttctcgagacgagcgatcgcgtgcttttgattggaaggtagattgaatcctct

SEQ ID NO: 33358 - DNA, 47 bp, Emericella nidulans
gaattcactgcggccgccatgctataatgctcacctcgcttctcacg

SEQ ID NO: 33359 - DNA, 48 bp, Emericella nidulans
gttctcgagacgagcgatcgccggtcttcgtgagacaccgatacatct

SEQ ID NO: 33360 - DNA, 45 bp, Emericella nidulans
gaattcactgcggccgccatgtctcctgcaagccaaagtctctca

SEQ ID NO: 33361 - DNA, 42 bp, Emericella nidulans
gttctcgagacgagcgatcgcccatcctcggagccaagcaca

SEQ ID NO: 33362 - DNA, 50 bp, Emericella nidulans
gaattcactgcggccgccatggaatagtttcgtcaagaccctcacgggta

SEQ ID NO: 33363 - DNA, 41 bp, Emericella nidulans
gttctcgagacgagcgatcgctggggcgcaactggttggag

SEQ ID NO: 33364 - DNA, 41 bp, Emericella nidulans
gaattcactgcggccgccatgggggcgggggtacgtctctg

SEQ ID NO: 33365 - DNA, 46 bp, Emericella nidulans
gttctcgagacgagcgatcgcgcaaagtacgcctgtacccccttct

SEQ ID NO: 33366 - DNA, 41 bp, Emericella nidulans
gaattcactgcggccgccatgctggtcctcagcccggctcc

SEQ ID NO: 33367 - DNA, 48 bp, Emericella nidulans
gttctcgagacgagcgatcgccaggcttatcgagaatcgagacgtcaa

SEQ ID NO: 33368 - DNA, 42 bp, Emericella nidulans
gaattcactgcggccgccatgcggcacccgggtatgttaccg

SEQ ID NO: 33369 - DNA, 41 bp, Emericella nidulans
gttctcgagacgagcgatcgctggagccctcgacggtgtga

SEQ ID NO: 33370 - DNA, 46 bp, Emericella nidulans
gaattcactgcggccgccatgattttcccacaacgtgcctatttgg

SEQ ID NO: 33371 - DNA, 41 bp, Emericella nidulans
gttctcgagacgagcgatcgctggtcggcgttgggcttatc

SEQ ID NO: 33372 - DNA, 41 bp, Emericella nidulans
gaattcactgcggccgccatgtggtggaatgccgtgctcgt

SEQ ID NO: 33373 - DNA, 41 bp, Emericella nidulans
gttctcgagacgagcgatcgctgaggggtgggatggcgaag

SEQ ID NO: 33374 - DNA, 41 bp, Emericella nidulans
gaattcactgcggccgccatgtggtcccgatggcagaacga

SEQ ID NO: 33375 - DNA, 41 bp, Emericella nidulans
gttctcgagacgagcgatcgcttccgtggtttccgcctgga

SEQ ID NO: 33376 - DNA, 41 bp, Emericella nidulans
gaattcactgcggccgccatgcgcaactggcgattcgttgc

SEQ ID NO: 33377 - DNA, 53 bp, Emericella nidulans
gttctcgagacgagcgatcgcaattgtaactggtattcagtccaaggcatctg

SEQ ID NO: 33378 - DNA, 41 bp, Emericella nidulans
gaattcactgcggccgccatgcggagcgagcgccagtggta

SEQ ID NO: 33379 - DNA, 45 bp, Emericella nidulans
gttctcgagacgagcgatcgccctccttcgcactcgaactcaacg

SEQ ID NO: 33380 - DNA, 41 bp, Emericella nidulans
gaattcactgcggccgccatgaggcgcccggttcccaaaat

SEQ ID NO: 33381 - DNA, 43 bp, Emericella nidulans
gttctcgagacgagcgatcgccggctgcgttcttgattactcc

SEQ ID NO: 33382 - DNA, 41 bp, Emericella nidulans
gaattcactgcggccgccatgcgcccttttccgaccctgga

SEQ ID NO: 33383 - DNA, 41 bp, Emericella nidulans
gttctcgagacgagcgatcgcatgcgcacttcccggccata

SEQ ID NO: 33384 - DNA, 41 bp, Emericella nidulans
gaattcactgcggccgccatgttcttgcagcctgccgctga

SEQ ID NO: 33385 - DNA, 41 bp, Emericella nidulans
gttctcgagacgagcgatcgcctgccccgcgttctcctcac

SEQ ID NO: 33386 - DNA, 44 bp, Emericella nidulans
gaattcactgcggccgccatggagaccccagctactgccgaatc

SEQ ID NO: 33387 - DNA, 48 bp, Emericella nidulans
gttctcgagacgagcgatcgccttcctttgaaacagccttagctttga

SEQ ID NO: 33388 - DNA, 53 bp, Emericella nidulans
gaattcactgcggccgccatgttccacgaaaataatatacaactcgtctatgg

SEQ ID NO: 33389 - DNA, 43 bp, Emericella nidulans
gttctcgagacgagcgatcgctcgaacgcatccatctccgttt

SEQ ID NO: 33390 - DNA, 44 bp, Emericella nidulans
gaattcactgcggccgccatgtggctcgtatgtcgccctactca

SEQ ID NO: 33391 - DNA, 52 bp, Emericella nidulans
gttctcgagacgagcgatcgcagtgagcttagtgagcttggtgagtctagca

SEQ ID NO: 33392 - DNA, 42 bp, Emericella nidulans
gaattcactgcggccgccatgtccaggcccctgttcataccg

SEQ ID NO: 33393 - DNA, 41 bp, Emericella nidulans
gttctcgagacgagcgatcgctctccaggcgttgcggcttc

SEQ ID NO: 33394 - DNA, 42 bp, Emericella nidulans
gaattcactgcggccgccatggggatgcagacgggcaactga

SEQ ID NO: 33395 - DNA, 43 bp, Emericella nidulans
gttctcgagacgagcgatcgcgccacacgctcaagctcgtcct

SEQ ID NO: 33396 - DNA, 42 bp, Emericella nidulans
gaattcactgcggccgccatgcggagaatggcatccttggaa

SEQ ID NO: 33397 - DNA, 41 bp, Emericella nidulans
gttctcgagacgagcgatcgccgtccactccaggcgcaagc

SEQ ID NO: 33398 - DNA, 44 bp, Emericella nidulans
gaattcactgcggccgccatgccagctgaaggactacgaggaca

SEQ ID NO: 33399 - DNA, 41 bp, Emericella nidulans
gttctcgagacgagcgatcgccgggagccttcggagacagc

SEQ ID NO: 33400 - DNA, 42 bp, Emericella nidulans
gaattcactgcggccgccatgggacgccgacctgcaggctaa

SEQ ID NO: 33401 - DNA, 41 bp, Emericella nidulans
gttctcgagacgagcgatcgcccgggtttccggcaacgaaa

SEQ ID NO: 33402 - DNA, 42 bp, Emericella nidulans
gaattcactgcggccgccatggccccttccgtcttgccttcc

SEQ ID NO: 33403 - DNA, 43 bp, Emericella nidulans
gttctcgagacgagcgatcgcgcccctttctcaaccctctccc

SEQ ID NO: 33404 - DNA, 41 bp, Emericella nidulans
gaattcactgcggccgccatgcacccaagccgacgctggag

SEQ ID NO: 33405 - DNA, 41 bp, Emericella nidulans
gttctcgagacgagcgatcgcgtggcggtgccacctcatcc

SEQ ID NO: 33406 - DNA, 41 bp, Emericella nidulans
gaattcactgcggccgccatgcggcagaccgtgctcacctg

SEQ ID NO: 33407 - DNA, 41 bp, Emericella nidulans
gttctcgagacgagcgatcgccagcattcccgccaacaacg

SEQ ID NO: 33408 - DNA, 43 bp, Emericella nidulans
gaattcactgcggccgccatgcccactgcggtatttgcggttc

SEQ ID NO: 33409 - DNA, 41 bp, Emericella nidulans
gttctcgagacgagcgatcgcctcggcggtcgcgacgtact

SEQ ID NO: 33410 - DNA, 42 bp, Emericella nidulans
gaattcactgcggccgccatgggtcgccaaaccgttcctacg

SEQ ID NO: 33411 - DNA, 44 bp, Emericella nidulans
gttctcgagacgagcgatcgctgctgcacatggaaaccctcctc

SEQ ID NO: 33412 - DNA, 49 bp, Emericella nidulans
gaattcactgcggccgccatggtctgatagaccgagagcctctttcaca

SEQ ID NO: 33413 - DNA, 45 bp, Emericella nidulans
gttctcgagacgagcgatcgccagcatcagaaagcaagccccaat

SEQ ID NO: 33414 - DNA, 49 bp, Emericella nidulans; identical to SEQ ID NO: 33412

SEQ ID NO: 33415 - DNA, 45 bp, Emericella nidulans; identical to SEQ ID NO: 33413

SEQ ID NO: 33416 - DNA, 41 bp, Emericella nidulans
gaattcactgcggccgccatgtgcgcatcctgcccattgag

SEQ ID NO: 33417 - DNA, 41 bp, Emericella nidulans
gttctcgagacgagcgatcgcgatccgctcccaagcctccc

SEQ ID NO: 33418 - DNA, 41 bp, Emericella nidulans
gaattcactgcggccgccatgaaggctggcaggcggaggag

SEQ ID NO: 33419 - DNA, 49 bp, Emericella nidulans
gttctcgagacgagcgatcgcggagaagagacctatccgtaatcggtgc

SEQ ID NO: 33420 - DNA, 48 bp, Emericella nidulans
gaattcactgcggccgccatgtggccgacagatattctttctccctga

SEQ ID NO: 33421 - DNA, 43 bp, Emericella nidulans
gttctcgagacgagcgatcgctcccttcagaatgccgcctgtc

SEQ ID NO: 33422 - DNA, 41 bp, Emericella nidulans
gaattcactgcggccgccatgaccgaatccgcggccatctt

SEQ ID NO: 33423 - DNA, 42 bp, Emericella nidulans
gttctcgagacgagcgatcgctcccaagccatgatgaaagca

SEQ ID NO: 33424 - DNA, 45 bp, Emericella nidulans
gaattcactgcggccgccatgccactacgcacgtcgatgaacagg

SEQ ID NO: 33425 - DNA, 46 bp, Emericella nidulans
gttctcgagacgagcgatcgcatcaacggtgtccctatatgctgga

SEQ ID NO: 33426 - DNA, 49 bp, Emericella nidulans
gaattcactgcggccgccatgcaactcggaacgtcagttacgaatgtct

SEQ ID NO: 33427 - DNA, 41 bp, Emericella nidulans
gttctcgagacgagcgatcgcaccagcccgtcccagcacac

SEQ ID NO: 33428 - DNA, 42 bp, Emericella nidulans
gaattcactgcggccgccatgcgtcgttgctggtgctggtga

SEQ ID NO: 33429 - DNA, 41 bp, Emericella nidulans
gttctcgagacgagcgatcgcgcggcgggtaaggacaccgt

SEQ ID NO: 33430 - DNA, 42 bp, Emericella nidulans
gaattcactgcggccgccatgcgctcgtacgccagcttggtt

SEQ ID NO: 33431 - DNA, 57 bp, Emericella nidulans
gttctcgagacgagcgatcgctccatttggacaagtatttcttctatgcccaattct

SEQ ID NO: 33432 - DNA, 42 bp, Emericella nidulans
gaattcactgcggccgccatgggccttgccacccctttctca

SEQ ID NO: 33433 - DNA, 46 bp, Emericella nidulans
gttctcgagacgagcgatcgccgtggaccttaatggtcttggcatc

SEQ ID NO: 33434 - DNA, 41 bp, Emericella nidulans
gaattcactgcggccgccatggcttggaatgcgcgtcaact

SEQ ID NO: 33435 - DNA, 43 bp, Emericella nidulans
gttctcgagacgagcgatcgctgccgcacattttcaatcatgg

SEQ ID NO: 33436 - DNA, 43 bp, Emericella nidulans
gaattcactgcggccgccatggccggaggcgcagctaaatacc

SEQ ID NO: 33437 - DNA, 48 bp, Emericella nidulans
gttctcgagacgagcgatcgcttttctcattcttcattgtcgcctttg

SEQ ID NO: 33438 - DNA, 43 bp, Emericella nidulans
gaattcactgcggccgccatgcggtggcactttaccacggctc

SEQ ID NO: 33439 - DNA, 41 bp, Emericella nidulans
gttctcgagacgagcgatcgctcgatgcgtttggccatccc

SEQ ID NO: 33440 - DNA, 43 bp, Emericella nidulans
gaattcactgcggccgccatgggcaattgcaaagtcggcaaga

SEQ ID NO: 33441 - DNA, 42 bp, Emericella nidulans
gttctcgagacgagcgatcgctcgcccattgaggcccttagc

SEQ ID NO: 33442 - DNA, 42 bp, Emericella nidulans
gaattcactgcggccgccatgcgtcattctcctggccgcaaa

SEQ ID NO: 33443 - DNA, 41 bp, Emericella nidulans
gttctcgagacgagcgatcgcccgcgagaaccgcattgtca

SEQ ID NO: 33444 - DNA, 41 bp, Emericella nidulans
gaattcactgcggccgccatgccggcgaaaagctggaggac

SEQ ID NO: 33445 - DNA, 41 bp, Emericella nidulans
gttctcgagacgagcgatcgccggcatccctcccaggatca

SEQ ID NO: 33446 - DNA, 41 bp, Emericella nidulans
gaattcactgcggccgccatgacgcgtccgccacaacttcc

SEQ ID NO: 33447 - DNA, 41 bp, Emericella nidulans
gttctcgagacgagcgatcgcacgagggtcccccgtcaagc

SEQ ID NO: 33448 - DNA, 52 bp, Emericella nidulans
gaattcactgcggccgccatgatctcattcactgccgtatctatttgatctc

SEQ ID NO: 33449 - DNA, 42 bp, Emericella nidulans
gttctcgagacgagcgatcgccccccactttgccaccagagc

SEQ ID NO: 33450 - DNA, 42 bp, Emericella nidulans
gaattcactgcggccgccatgtggcttgtccgttgccagtcc

SEQ ID NO: 33451 - DNA, 42 bp, Emericella nidulans
gttctcgagacgagcgatcgctaggtgaaatgcgcggcggta

SEQ ID NO: 33452 - DNA, 42 bp, Emericella nidulans
gaattcactgcggccgccatgcggttgtgccaccaaagaggg

SEQ ID NO: 33453 - DNA, 50 bp, Emericella nidulans
gttctcgagacgagcgatcgcagattaaaccacggaatcacttgaatgaa

SEQ ID NO: 33454 - DNA, 44 bp, Emericella nidulans
gaattcactgcggccgccatgcgcaaactcaagcatcacgagca

SEQ ID NO: 33455 - DNA, 46 bp, Emericella nidulans
gttctcgagacgagcgatcgccgataccgcatgatattccgcttga

SEQ ID NO: 33456 - DNA, 53 bp, Emericella nidulans
gaattcactgcggccgccatgctttcatcataccagcaaatactgaccagcct

SEQ ID NO: 33457 - DNA, 42 bp, Emericella nidulans
gttctcgagacgagcgatcgctgtacacatgaaccgcgtccc

SEQ ID NO: 33458 - DNA, 42 bp, Emericella nidulans
gaattcactgcggccgccatgccaacgcaggcgttgcgtatc

SEQ ID NO: 33459 - DNA, 49 bp, Emericella nidulans
gttctcgagacgagcgatcgcctgtcaatctgtcgacggcctcgcatta

SEQ ID NO: 33460 - DNA, 52 bp, Emericella nidulans
gaattcactgcggccgccatgacgtttctgaccttatcattgtagctgggac

SEQ ID NO: 33461 - DNA, 41 bp, Emericella nidulans
gttctcgagacgagcgatcgcctcggcctgcttccagaccc

SEQ ID NO: 33462 - DNA, 41 bp, Emericella nidulans
gaattcactgcggccgccatgggccggccgctgaaagacat

SEQ ID NO: 33463 - DNA, 41 bp, Emericella nidulans
gttctcgagacgagcgatcgcttgcgcgctccgtttcttca

SEQ ID NO: 33464 - DNA, 41 bp, Emericella nidulans
gaattcactgcggccgccatgcggcagtcgctccgtgggta

SEQ ID NO: 33465 - DNA, 48 bp, Emericella nidulans
gttctcgagacgagcgatcgccacatttgttaccaccagttggttgag

SEQ ID NO: 33466 - DNA, 40 bp, Emericella nidulans
gaattcactgcggccgccatggtgcgccagccgtcaaagc

SEQ ID NO: 33467 - DNA, 47 bp, Emericella nidulans
gttctcgagacgagcgatcgcgttagcacaaacctcaggcagacttt

SEQ ID NO: 33468 - DNA, 57 bp, Emericella nidulans
gaattcactgcggccgccatgactatgaagttcttcgagaacctctatacatacgaa

SEQ ID NO: 33469 - DNA, 41 bp, Emericella nidulans
gttctcgagacgagcgatcgccgctgcgcagtcgctcaaga

SEQ ID NO: 33470 - DNA, 41 bp, Emericella nidulans
gaattcactgcggccgccatgtccaggcaacccagcggtct

SEQ ID NO: 33471 - DNA, 41 bp, Emericella nidulans
gttctcgagacgagcgatcgcagccccgcaatggccttgaa

SEQ ID NO: 33472 - DNA, 41 bp, Emericella nidulans
gaattcactgcggccgccatgccgaagcgagccttgggacc

SEQ ID NO: 33473 - DNA, 44 bp, Emericella nidulans
gttctcgagacgagcgatcgcgcaagggaagtcggcaaaatgga

SEQ ID NO: 33474 - DNA, 56 bp, Emericella nidulans
gaattcactgcggccgccatgtgtaaactttaattcatgggagtacagaaagctga

SEQ ID NO: 33475 - DNA, 41 bp, Emericella nidulans
gttctcgagacgagcgatcgcgcctccctcacagccgcaat

SEQ ID NO: 33476 - DNA, 41 bp, Emericella nidulans
gaattcactgcggccgccatgttctcgccaaagcgaacggt

SEQ ID NO: 33477 - DNA, 53 bp, Emericella nidulans
gttctcgagacgagcgatcgctgcatacaagaaagacccgttagacggcttag

SEQ ID NO: 33478 - DNA, 44 bp, Emericella nidulans
gaattcactgcggccgccatgccccagagaatcttcccgacggt

SEQ ID NO: 33479 - DNA, 41 bp, Emericella nidulans
gttctcgagacgagcgatcgcccgacggcggtacgagttgg

SEQ ID NO: 33480 - DNA, 41 bp, Emericella nidulans
gaattcactgcggccgccatgccgcgcggtccgaagaaaag

SEQ ID NO: 33481 - DNA, 49 bp, Emericella nidulans
gttctcgagacgagcgatcgcactggagtatagtacgccccattaacca

SEQ ID NO: 33482 - DNA, 42 bp, Emericella nidulans
gaattcactgcggccgccatgtgaggagcgccagattggtgg

SEQ ID NO: 33483 - DNA, 41 bp, Emericella nidulans
gttctcgagacgagcgatcgccataccacggccacggcctc

SEQ ID NO: 33484 - DNA, 41 bp, Emericella nidulans
gaattcactgcggccgccatgttcgccggcggcttatagat

SEQ ID NO: 33485 - DNA, 55 bp, Emericella nidulans
gttctcgagacgagcgatcgcaagcatttgatatatagaattccatcaagtttca

SEQ ID NO: 33486 - DNA, 53 bp, Emericella nidulans
gaattcactgcggccgccatgcaatacaatgatacgcaggagatctatgaacg

SEQ ID NO: 33487 - DNA, 51 bp, Emericella nidulans
gttctcgagacgagcgatcgcgcaggatattattcctgctgcagggacttg

SEQ ID NO: 33488 - DNA, 43 bp, Emericella nidulans
gaattcactgcggccgccatgggtcccgatcctcagacgcaag

SEQ ID NO: 33489 - DNA, 41 bp, Emericella nidulans
gttctcgagacgagcgatcgctttgcgcaagagcggcttcc

SEQ ID NO: 33490 - DNA, 41 bp, Emericella nidulans
gaattcactgcggccgccatggagtcctccggcgccaacag

SEQ ID NO: 33491 - DNA, 52 bp, Emericella nidulans
gttctcgagacgagcgatcgcatttcagtagacacgtttgcgctatttactt

SEQ ID NO: 33492 - DNA, 42 bp, Emericella nidulans
gaattcactgcggccgccatgtccgaacccactgcgaacacc

SEQ ID NO: 33493 - DNA, 56 bp, Emericella nidulans
gttctcgagacgagcgatcgcaacattatcgtcatcgtacatgaaattgatatccc

SEQ ID NO: 33494 - DNA, 47 bp, Emericella nidulans
gaattcactgcggccgccatggcctcttatgaccatggtttaccaaa

SEQ ID NO: 33495 - DNA, 42 bp, Emericella nidulans
gttctcgagacgagcgatcgccgcgacatcgttgcagccact

SEQ ID NO: 33496 - DNA, 44 bp, Emericella nidulans
gaattcactgcggccgccatgcgaactgtctttgtcccagcaaa

SEQ ID NO: 33497 - DNA, 41 bp, Emericella nidulans
gttctcgagacgagcgatcgcgggccggacgttgaggattt

SEQ ID NO: 33498 - DNA, 43 bp, Emericella nidulans
gaattcactgcggccgccatgtcgggatccggctctattgtga

SEQ ID NO: 33499 - DNA, 43 bp, Emericella nidulans
gttctcgagacgagcgatcgccagactggacacccatcgcaca

SEQ ID NO: 33500 - DNA, 50 bp, Emericella nidulans
gaattcactgcggccgccatggatccataatcttctcacagacaagcctc

SEQ ID NO: 33501 - DNA, 41 bp, Emericella nidulans
gttctcgagacgagcgatcgctgcccagctcggctgtatgc

SEQ ID NO: 33502 - DNA, 43 bp, Emericella nidulans
gaattcactgcggccgccatgggactcttgagcggggccgata

SEQ ID NO: 33503 - DNA, 41 bp, Emericella nidulans
gttctcgagacgagcgatcgcgctcccgggcttgctcttcg

SEQ ID NO: 33504 - DNA, 55 bp, Emericella nidulans
gaattcactgcggccgccatgccacagtttcatttatcatctatcttgctcttgc

SEQ ID NO: 33505 - DNA, 48 bp, Emericella nidulans
gttctcgagacgagcgatcgctcagcacaaatcaatcgaaaagaatgg

SEQ ID NO: 33506 - DNA, 51 bp, Emericella nidulans
gaattcactgcggccgccatggaaggattggattggtctttacaaggtcac

SEQ ID NO: 33507 - DNA, 50 bp, Emericella nidulans
gttctcgagacgagcgatcgccaaagaaagttcatagaagctggggaacg

SEQ ID NO: 33508 - DNA, 46 bp, Emericella nidulans
gaattcactgcggccgccatgccccaacactgacattccggatctt

SEQ ID NO: 33509 - DNA, 42 bp, Emericella nidulans
gttctcgagacgagcgatcgcccgtatgcgtcctccgcctgt

SEQ ID NO: 33510 - DNA, 41 bp, Emericella nidulans
gaattcactgcggccgccatgctatcccgggccagcgccta

SEQ ID NO: 33511 - DNA, 41 bp, Emericella nidulans
gttctcgagacgagcgatcgcgttctgcggccccagtgacg

SEQ ID NO: 33512 - DNA, 52 bp, Emericella nidulans
gaattcactgcggccgccatgagcaacaaactcatagtatttcaacggaccc

SEQ ID NO: 33513 - DNA, 45 bp, Emericella nidulans
gttctcgagacgagcgatcgcccgcgaaaaagagatttggcaggt

SEQ ID NO: 33514 - DNA, 42 bp, Emericella nidulans
gaattcactgcggccgccatgtggcagcggacacagcttagg

SEQ ID NO: 33515 - DNA, 41 bp, Emericella nidulans
gttctcgagacgagcgatcgcatctgttgcgcggccgtcat

SEQ ID NO: 33516 - DNA, 41 bp, Emericella nidulans
gaattcactgcggccgccatgactgcggcagagcgaccaca

SEQ ID NO: 33517 - DNA, 51 bp, Emericella nidulans
gttctcgagacgagcgatcgcgtcagtatcaagcatgagtctagcacagga

SEQ ID NO: 33518 - DNA, 55 bp, Emericella nidulans
gaattcactgcggccgccatggaaaagtatcgaggatagtctcaagcaggccaac

SEQ ID NO: 33519 - DNA, 43 bp, Emericella nidulans
gttctcgagacgagcgatcgcccaccgtaggatcccatgcaca

SEQ ID NO: 33520 - DNA, 42 bp, Emericella nidulans
gaattcactgcggccgccatggccgcacctcaaagtcatgtg

SEQ ID NO: 33521 - DNA, 41 bp, Emericella nidulans
gttctcgagacgagcgatcgctccacccgccgtccattctc

SEQ ID NO: 33522 - DNA, 41 bp, Emericella nidulans
gaattcactgcggccgccatgtgggcgctcctaccccctct

SEQ ID NO: 33523 - DNA, 50 bp, Emericella nidulans
gttctcgagacgagcgatcgcgatagccgaaaatttccatactaggttca

SEQ ID NO: 33524 - DNA, 41 bp, Emericella nidulans
gaattcactgcggccgccatgcgccagcgcctcatccaact

SEQ ID NO: 33525 - DNA, 44 bp, Emericella nidulans
gttctcgagacgagcgatcgccctccctccaaacccaacatcca

SEQ ID NO: 33526 - DNA, 57 bp, Emericella nidulans
gaattcactgcggccgccatgcctaattcaggtatactgataatggaggctcggtcc

SEQ ID NO: 33527 - DNA, 51 bp, Emericella nidulans
gttctcgagacgagcgatcgcatccttcttcaaggggtgatagacctcctc

SEQ ID NO: 33528 - DNA, 41 bp, Emericella nidulans
gaattcactgcggccgccatgcgcagacgcaaacggtcaca

SEQ ID NO: 33529 - DNA, 44 bp, Emericella nidulans
gttctcgagacgagcgatcgctcacgtcgcaaaacatctgcacc

SEQ ID NO: 33530 - DNA, 41 bp, Emericella nidulans
gaattcactgcggccgccatgtggagcgtgccgattcaagc

SEQ ID NO: 33531 - DNA, 45 bp, Emericella nidulans
gttctcgagacgagcgatcgctccagtccttcaccttgccgacat

SEQ ID NO: 33532 - DNA, 41 bp, Emericella nidulans
gaattcactgcggccgccatgtgcatcgccagcgaaacctc

SEQ ID NO: 33533 - DNA, 41 bp, Emericella nidulans
gttctcgagacgagcgatcgctgagcgtgcccgatctggag

SEQ ID NO: 33534 - DNA, 41 bp, Emericella nidulans
gaattcactgcggccgccatgccgacgaagaaggcggcgta

SEQ ID NO: 33535 - DNA, 41 bp, Emericella nidulans
gttctcgagacgagcgatcgcgacgcagcgagtccgcaatg

SEQ ID NO: 33536 - DNA, 41 bp, Emericella nidulans
gaattcactgcggccgccatggctaccacacgccgcaagga

SEQ ID NO: 33537 - DNA, 42 bp, Emericella nidulans
gttctcgagacgagcgatcgcgcataccacgacgcgactccc

SEQ ID NO: 33538 - DNA, 41 bp, Emericella nidulans
gaattcactgcggccgccatggtcaaggctcgccgcaccat

SEQ ID NO: 33539 - DNA, 41 bp, Emericella nidulans
gttctcgagacgagcgatcgcgcggtcctcgatgggagcaa

SEQ ID NO: 33540 - DNA, 43 bp, Emericella nidulans
gaattcactgcggccgccatgaccatccgaacccgaagcagtc

SEQ ID NO: 33541 - DNA, 41 bp, Emericella nidulans
gttctcgagacgagcgatcgcccgggcacctgggtcttcct

SEQ ID NO: 33542 - DNA, 41 bp, Emericella nidulans
gaattcactgcggccgccatgggcagcttcgcccgtgcata

SEQ ID NO: 33543 - DNA, 44 bp, Emericella nidulans
gttctcgagacgagcgatcgcgcactttcatccagccttccttg

SEQ ID NO: 33544 - DNA, 41 bp, Emericella nidulans
gaattcactgcggccgccatgtcttcggtgccgggcctgta

SEQ ID NO: 33545 - DNA, 56 bp, Emericella nidulans
gttctcgagacgagcgatcgccttggtatatccttcaatcctcttatcaaacttgt

SEQ ID NO: 33546 - DNA, 47 bp, Emericella nidulans
gaattcactgcggccgccatgctacgatgacggtcttttcatcttcg

SEQ ID NO: 33547 - DNA, 42 bp, Emericella nidulans
gttctcgagacgagcgatcgccccgccaaactcccagtacgc

SEQ ID NO: 33548 - DNA, 42 bp, Emericella nidulans
gaattcactgcggccgccatgggggacgtgcccaggcttaga

SEQ ID NO: 33549 - DNA, 41 bp, Emericella nidulans
gttctcgagacgagcgatcgctttgtgctgcgcctcccacc

SEQ ID NO: 33550 - DNA, 41 bp, Emericella nidulans; identical to SEQ ID NO: 33544

SEQ ID NO: 33551 - DNA, 56 bp, Emericella nidulans; identical to SEQ ID NO: 33545

SEQ ID NO: 33552 - DNA, 54 bp, Emericella nidulans
gaattcactgcggccgccatgcagattaaggaggccctgcttgatcctcaggta

SEQ ID NO: 33553 - DNA, 48 bp, Emericella nidulans
gttctcgagacgagcgatcgcgctgatagtcaagcagacatagcaacc

SEQ ID NO: 33554 - DNA, 41 bp, Emericella nidulans
gaattcactgcggccgccatgcttggcgccacgcctcattc

SEQ ID NO: 33555 - DNA, 47 bp, Emericella nidulans
gttctcgagacgagcgatcgcccccactgtgatcgttctcactagcc

SEQ ID NO: 33556 - DNA, 42 bp, Emericella nidulans
gaattcactgcggccgccatgcagcaacgggagctcgtcgaa

SEQ ID NO: 33557 - DNA, 46 bp, Emericella nidulans
gttctcgagacgagcgatcgcgtttccactcgtcgaattcttcctc

SEQ ID NO: 33558 - DNA, 41 bp, Emericella nidulans
gaattcactgcggccgccatgcctcgtccccgagaccctcc

SEQ ID NO: 33559 - DNA, 41 bp, Emericella nidulans
gttctcgagacgagcgatcgcgagcgacgcgctgcttgtca

SEQ ID NO: 33560 - DNA, 41 bp, Emericella nidulans
gaattcactgcggccgccatgccccggaacaatcgcactcg

SEQ ID NO: 33561 - DNA, 44 bp, Emericella nidulans
gttctcgagacgagcgatcgcacgcctccatcctgtttgaaatc

SEQ ID NO: 33562 - DNA, 46 bp, Emericella nidulans
gaattcactgcggccgccatgtattcacctttcggcaatgcgtgag

SEQ ID NO: 33563 - DNA, 41 bp, Emericella nidulans
gttctcgagacgagcgatcgcgcgccagcggcaactgctat

SEQ ID NO: 33564 - DNA, 41 bp, Emericella nidulans
gaattcactgcggccgccatgaagtgagcgatggccgggtg

SEQ ID NO: 33565 - DNA, 41 bp, Emericella nidulans
gttctcgagacgagcgatcgcggccaatcttcggcctgcac

SEQ ID NO: 33566 - DNA, 45 bp, Emericella nidulans
gaattcactgcggccgccatgtccggtatcatcctctccaccaca

SEQ ID NO: 33567 - DNA, 46 bp, Emericella nidulans
gttctcgagacgagcgatcgcggcgcatcttttagcgttaggatgg

SEQ ID NO: 33568 - DNA, 44 bp, Emericella nidulans
gaattcactgcggccgccatgggccgactctctgaccgaagagc

SEQ ID NO: 33569 - DNA, 48 bp, Emericella nidulans
gttctcgagacgagcgatcgcgaattcgttgtctgcagccgatcagta

SEQ ID NO: 33570 - DNA, 51 bp, Emericella nidulans
gaattcactgcggccgccatggacttccttcgccttcatgattgctatgct

SEQ ID NO: 33571 - DNA, 52 bp, Emericella nidulans
gttctcgagacgagcgatcgcgaatagtctgtaaaccagttagcatcacacc

SEQ ID NO: 33572 - DNA, 41 bp, Emericella nidulans
gaattcactgcggccgccatggcccgtcgggcttttcatgc

SEQ ID NO: 33573 - DNA, 42 bp, Emericella nidulans
gttctcgagacgagcgatcgcgacgccaggcaccgagaatca

SEQ ID NO: 33574 - DNA, 53 bp, Emericella nidulans
gaattcactgcggccgccatggatctgattctagtgccactgatccagctacg

SEQ ID NO: 33575 - DNA, 48 bp, Emericella nidulans
gttctcgagacgagcgatcgcgcacgacattgactacttcatcgtccc

SEQ ID NO: 33576 - DNA, 41 bp, Emericella nidulans
gaattcactgcggccgccatgcgcaaacgaagtcgccgttg

SEQ ID NO: 33577 - DNA, 41 bp, Emericella nidulans
gttctcgagacgagcgatcgccgagaccgttggtccgggag

SEQ ID NO: 33578 - DNA, 52 bp, Emericella nidulans
gaattcactgcggccgccatgagtttcccaacagcagttagaagacataggc

SEQ ID NO: 33579 - DNA, 41 bp, Emericella nidulans
gttctcgagacgagcgatcgcgcgaaactaaccgcggtgcc

SEQ ID NO: 33580 - DNA, 53 bp, Emericella nidulans
gaattcactgcggccgccatggaacagaactgacttattggtgaaggaaaacc

SEQ ID NO: 33581 - DNA, 46 bp, Emericella nidulans
gttctcgagacgagcgatcgctgagtgttgaggtttgccagttctc

SEQ ID NO: 33582 - DNA, 41 bp, Emericella nidulans
gaattcactgcggccgccatgcgcccttccggccttttcag

SEQ ID NO: 33583 - DNA, 41 bp, Emericella nidulans
gttctcgagacgagcgatcgcgctcctggcggagaccctca

SEQ ID NO: 33584 - DNA, 41 bp, Emericella nidulans
gaattcactgcggccgccatgaccgtggcattgcaggagcc

SEQ ID NO: 33585 - DNA, 42 bp, Emericella nidulans
gttctcgagacgagcgatcgctcctcgcaggcagcaacatcc

SEQ ID NO: 33586 - DNA, 42 bp, Emericella nidulans
gaattcactgcggccgccatgtccccaatgacgcctccgttt

SEQ ID NO: 33587 - DNA, 57 bp, Emericella nidulans
gttctcgagacgagcgatcgccatccaaattctagttttgtaaatcttgaaaaggtc

SEQ ID NO: 33588 - DNA, 39 bp, Emericella nidulans
gaattcactgcggccgccatgccgtgacccgtgggatcg

SEQ ID NO: 33589 - DNA, 45 bp, Emericella nidulans
gttctcgagacgagcgatcgccagacgctctcgcaaatctcacca

SEQ ID NO: 33590 - DNA, 44 bp, Emericella nidulans
gaattcactgcggccgccatgccggtggagaatccctaaatcaa

SEQ ID NO: 33591 - DNA, 44 bp, Emericella nidulans
gttctcgagacgagcgatcgccgactccacaaggggaatcaagc

SEQ ID NO: 33592 - DNA, 42 bp, Emericella nidulans
gaattcactgcggccgccatgggattgtcggggtgtcgatgg

SEQ ID NO: 33593 - DNA, 49 bp, Emericella nidulans
gttctcgagacgagcgatcgctggaaatgttgaagtttgtttctctccc

SEQ ID NO: 33594 - DNA, 41 bp, Emericella nidulans
gaattcactgcggccgccatgcgggcttacgaccgccgttt

SEQ ID NO: 33595 - DNA, 42 bp, Emericella nidulans
gttctcgagacgagcgatcgccccgtcgcatcagcttgttgg

SEQ ID NO: 33596 - DNA, 45 bp, Emericella nidulans
gaattcactgcggccgccatggctaggtattggcgcaaatgggac

SEQ ID NO: 33597 - DNA, 43 bp, Emericella nidulans
gttctcgagacgagcgatcgccctcctcaccaacccaccctgt

SEQ ID NO: 33598 - DNA, 43 bp, Emericella nidulans
gaattcactgcggccgccatgtggcccacatgaatctgcctcc

SEQ ID NO: 33599 - DNA, 41 bp, Emericella nidulans
gttctcgagacgagcgatcgccagcatggcctgcgcatcac

SEQ ID NO: 33600 - DNA, 49 bp, Emericella nidulans
gaattcactgcggccgccatgtctttctcattgtgctgctttttgttgc

SEQ ID NO: 33601 - DNA, 51 bp, Emericella nidulans
gttctcgagacgagcgatcgccaccaggtatacagagttagcgactcatgg

SEQ ID NO: 33602 - DNA, 41 bp, Emericella nidulans
gaattcactgcggccgccatgcgccgccccagaacaaaaag

SEQ ID NO: 33603 - DNA, 44 bp, Emericella nidulans
gttctcgagacgagcgatcgcgcaccatacctcgcccggtaatc

SEQ ID NO: 33604 - DNA, 47 bp, Emericella nidulans
gaattcactgcggccgccatgtttgtcacgtctgctatcctccctga

SEQ ID NO: 33605 - DNA, 45 bp, Emericella nidulans
gttctcgagacgagcgatcgcgactccgtgcaaataaagccaaga

SEQ ID NO: 33606 - DNA, 45 bp, Emericella nidulans
gaattcactgcggccgccatgccaaccatgcctgtcaagttcctc

SEQ ID NO: 33607 - DNA, 49 bp, Emericella nidulans
gttctcgagacgagcgatcgctccgcaaactggtaatagtactccaagc

SEQ ID NO: 33608 - DNA, 41 bp, Emericella nidulans
gaattcactgcggccgccatgtcttgctgcgggaccgcttg

SEQ ID NO: 33609 - DNA, 41 bp, Emericella nidulans
gttctcgagacgagcgatcgcaaacccgcagcaccgcctct

SEQ ID NO: 33610 - DNA, 42 bp, Emericella nidulans
gaattcactgcggccgccatgtgccttcgctcctcctccacc

SEQ ID NO: 33611 - DNA, 52 bp, Emericella nidulans
gttctcgagacgagcgatcgcttttgtagtggactgaatcgtagatcccaca

SEQ ID NO: 33612 - DNA, 41 bp, Emericella nidulans
gaattcactgcggccgccatgcggcagtcgcatcccctcac

SEQ ID NO: 33613 - DNA, 53 bp, Emericella nidulans
gttctcgagacgagcgatcgcactggcaacagtaagctcattattacccttca

SEQ ID NO: 33614 - DNA, 56 bp, Emericella nidulans
gaattcactgcggccgccatgcttatataacctctctccaaataaataccaagcaa

SEQ ID NO: 33615 - DNA, 48 bp, Emericella nidulans
gttctcgagacgagcgatcgccactaggttgagcatcctgacaaattc

SEQ ID NO: 33616 - DNA, 57 bp, Emericella nidulans
gaattcactgcggccgccatgccaaactcatcatcttcgacttcgatggaactctct

SEQ ID NO: 33617 - DNA, 42 bp, Emericella nidulans
gttctcgagacgagcgatcgcgcccgtcacagctcatcgaca

SEQ ID NO: 33618 - DNA, 40 bp, Emericella nidulans
gaattcactgcggccgccatgcacgcgtgtcgcagccctc

SEQ ID NO: 33619 - DNA, 41 bp, Emericella nidulans
gttctcgagacgagcgatcgcaaaccgccccgcaacctcat

SEQ ID NO: 33620 - DNA, 43 bp, Emericella nidulans
gaattcactgcggccgccatgtccccagaagggtttggcaatg

SEQ ID NO: 33621 - DNA, 48 bp, Emericella nidulans
gttctcgagacgagcgatcgcatgacgcctctcacttaagcaaatgat

SEQ ID NO: 33622 - DNA, 41 bp, Emericella nidulans
gaattcactgcggccgccatgaggcctgggagatgcgatgg

SEQ ID NO: 33623 - DNA, 41 bp, Emericella nidulans
gttctcgagacgagcgatcgccggcgagcgcgaccagaata

SEQ ID NO: 33624 - DNA, 43 bp, Emericella nidulans
gaattcactgcggccgccatggggatgataccaccgcagaggc

SEQ ID NO: 33625 - DNA, 53 bp, Emericella nidulans
gttctcgagacgagcgatcgcgtacctgatatccaaaccttccatagtcccac

SEQ ID NO: 33626 - DNA, 42 bp, Emericella nidulans
gaattcactgcggccgccatgcaccgggcaatagcagctccc

SEQ ID NO: 33627 - DNA, 41 bp, Emericella nidulans
gttctcgagacgagcgatcgccgcgcattcggtctggatga

SEQ ID NO: 33628 - DNA, 49 bp, Emericella nidulans
gaattcactgcggccgccatgaccgatatgaacttagcgagctctacga

SEQ ID NO: 33629 - DNA, 42 bp, Emericella nidulans
gttctcgagacgagcgatcgcccccacagttgcaccccctgt

SEQ ID NO: 33630 - DNA, 42 bp, Emericella nidulans
gaattcactgcggccgccatgcgcaccagctgagcgatgtca

SEQ ID NO: 33631 - DNA, 41 bp, Emericella nidulans
gttctcgagacgagcgatcgcccgggacttggatcgacggt

SEQ ID NO: 33632 - DNA, 41 bp, Emericella nidulans
gaattcactgcggccgccatgcgcgaccccagagacgaagc

SEQ ID NO: 33633 - DNA, 41 bp, Emericella nidulans
gttctcgagacgagcgatcgctccgcgcataaccatgcaaa

SEQ ID NO: 33634 - DNA, 42 bp, Emericella nidulans
gaattcactgcggccgccatgcgacggaccgaacaacaccgt

SEQ ID NO: 33635 - DNA, 48 bp, Emericella nidulans
gttctcgagacgagcgatcgcgtacacacttgatccatctggcgatgc

SEQ ID NO: 33636 - DNA, 47 bp, Emericella nidulans
gaattcactgcggccgccatggccacagacaagaaagtcatcgcatt

SEQ ID NO: 33637 - DNA, 41 bp, Emericella nidulans
gttctcgagacgagcgatcgcaccaccgcagtcggcctcag

SEQ ID NO: 33638 - DNA, 41 bp, Emericella nidulans
gaattcactgcggccgccatggagcaccccgaggttggtgg

SEQ ID NO: 33639 - DNA, 41 bp, Emericella nidulans
gttctcgagacgagcgatcgccgcttctccccgaacaccgt

SEQ ID NO: 33640 - DNA, 43 bp, Emericella nidulans
gaattcactgcggccgccatgggaaatccgcttcgtgcgatgt

SEQ ID NO: 33641 - DNA, 48 bp, Emericella nidulans
gttctcgagacgagcgatcgcgcatcattcgttcatctcactttcaca

SEQ ID NO: 33642 - DNA, 51 bp, Emericella nidulans; identical to SEQ ID NO: 29546

SEQ ID NO: 33643 - DNA, 40 bp, Emericella nidulans
gttctcgagacgagcgatcgcgcctccgcctgatcgcctc

SEQ ID NO: 33644 - DNA, 43 bp, Emericella nidulans
gaattcactgcggccgccatgtcgaatcattggaggtgcttgg

SEQ ID NO: 33645 - DNA, 42 bp, Emericella nidulans
gttctcgagacgagcgatcgctccatggcgacgtctgcttca

SEQ ID NO: 33646 - DNA, 41 bp, Emericella nidulans
gaattcactgcggccgccatgtggcctcagcgcgttcctct

SEQ ID NO: 33647 - DNA, 41 bp, Emericella nidulans
gttctcgagacgagcgatcgccaacaggcgcaggacgacga

SEQ ID NO: 33648 - DNA, 41 bp, Emericella nidulans
gaattcactgcggccgccatgtgccagcaggaagccgaaca

SEQ ID NO: 33649 - DNA, 41 bp, Emericella nidulans
gttctcgagacgagcgatcgccgcggtcctctagcctgcaa

SEQ ID NO: 33650 - DNA, 46 bp, Emericella nidulans
gaattcactgcggccgccatgtgccgctaaactgatgcatcttcca

SEQ ID NO: 33651 - DNA, 41 bp, Emericella nidulans
gttctcgagacgagcgatcgccgatgccgatgggcttgagg

SEQ ID NO: 33652 - DNA, 42 bp, Emericella nidulans
gaattcactgcggccgccatgtcccgcattgagagcaacagc

SEQ ID NO: 33653 - DNA, 41 bp, Emericella nidulans
gttctcgagacgagcgatcgcttgcccgctacgcagatccc

SEQ ID NO: 33654 - DNA, 47 bp, Emericella nidulans
gaattcactgcggccgccatggcacgtccctatcgtcaagaagcgta

SEQ ID NO: 33655 - DNA, 41 bp, Emericella nidulans
gttctcgagacgagcgatcgcgccacgggggttggtgacct

SEQ ID NO: 33656 - DNA, 51 bp, Emericella nidulans
gaattcactgcggccgccatgagttcccaatctcaagggactagagagagc

SEQ ID NO: 33657 - DNA, 42 bp, Emericella nidulans
gttctcgagacgagcgatcgcgcccacaatgctgcacctgct

SEQ ID NO: 33658 - DNA, 41 bp, Emericella nidulans
gaattcactgcggccgccatggtggccaccaatcgccaggt

SEQ ID NO: 33659 - DNA, 42 bp, Emericella nidulans
gttctcgagacgagcgatcgcgcggtcatcgtgctggcattt

SEQ ID NO: 33660 - DNA, 47 bp, Emericella nidulans
gaattcactgcggccgccatgtgtttctaactgttaccccttgtggg

SEQ ID NO: 33661 - DNA, 43 bp, Emericella nidulans
gttctcgagacgagcgatcgctgggaaggtctgaggtgaggga

SEQ ID NO: 33662 - DNA, 42 bp, Emericella nidulans
gaattcactgcggccgccatgtcacctcctgcaacccctgga

SEQ ID NO: 33663 - DNA, 44 bp, Emericella nidulans
gttctcgagacgagcgatcgcaggatgattgggaacctgacagc

SEQ ID NO: 33664 - DNA, 41 bp, Emericella nidulans
gaattcactgcggccgccatggacgaaccccgcctgcattc

SEQ ID NO: 33665 - DNA, 41 bp, Emericella nidulans
gttctcgagacgagcgatcgctcccgacccagatgggcagt

SEQ ID NO: 33666 - DNA, 42 bp, Emericella nidulans
gaattcactgcggccgccatgtccagctctccaacgcggaac

SEQ ID NO: 33667 - DNA, 41 bp, Emericella nidulans
gttctcgagacgagcgatcgcttcccaggcggcttgctctg

SEQ ID NO: 33668 - DNA, 46 bp, Emericella nidulans
gaattcactgcggccgccatgttctgatgaccgatgtcgactgtct

SEQ ID NO: 33669 - DNA, 47 bp, Emericella nidulans
gttctcgagacgagcgatcgcaaagagatgttttctcgcagcgcaac

SEQ ID NO: 33670 - DNA, 41 bp, Emericella nidulans
gaattcactgcggccgccatgtcgccaagtccaagcgctga

SEQ ID NO: 33671 - DNA, 40 bp, Emericella nidulans
gttctcgagacgagcgatcgcgcggtggcggtgatggtgt

SEQ ID NO: 33672 - DNA, 41 bp, Emericella nidulans
gaattcactgcggccgccatgcgtggacggacgcacactca

SEQ ID NO: 33673 - DNA, 41 bp, Emericella nidulans
gttctcgagacgagcgatcgcgcccccagcggtagcagaca

SEQ ID NO: 33674 - DNA, 43 bp, Emericella nidulans
gaattcactgcggccgccatgtccctcgtctggaaccttgctg

SEQ ID NO: 33675 - DNA, 41 bp, Emericella nidulans
gttctcgagacgagcgatcgcccgcccacctccaaagtctg

SEQ ID NO: 33676 - DNA, 40 bp, Emericella nidulans
gaattcactgcggccgccatgcagccgcttctgccgtcaa

SEQ ID NO: 33677 - DNA, 43 bp, Emericella nidulans
gttctcgagacgagcgatcgcaacactcaccgagcctccatca

SEQ ID NO: 33678 - DNA, 41 bp, Emericella nidulans
gaattcactgcggccgccatggcctctgcagctgccatccc

SEQ ID NO: 33679 - DNA, 41 bp, Emericella nidulans
gttctcgagacgagcgatcgcggcactgtcgcgtccccaaa

SEQ ID NO: 33680 - DNA, 41 bp, Emericella nidulans
gaattcactgcggccgccatgagccacgccgtcgaagatgc

SEQ ID NO: 33681 - DNA, 42 bp, Emericella nidulans
gttctcgagacgagcgatcgccgagcctcatagcgccgttca

SEQ ID NO: 33682 - DNA, 41 bp, Emericella nidulans
gaattcactgcggccgccatgcatccggacgtggtcaacga

SEQ ID NO: 33683 - DNA, 43 bp, Emericella nidulans
gttctcgagacgagcgatcgcgccgagagcttacggcgagtga

SEQ ID NO: 33684 - DNA, 41 bp, Emericella nidulans
gaattcactgcggccgccatgatcccgcccgaccaagaagg

SEQ ID NO: 33685 - DNA, 43 bp, Emericella nidulans
gttctcgagacgagcgatcgccgcgcgcgtacttaaacaagca

SEQ ID NO: 33686 - DNA, 43 bp, Emericella nidulans
gaattcactgcggccgccatgtgccatccgtactcgaggagcc

SEQ ID NO: 33687 - DNA, 41 bp, Emericella nidulans
gttctcgagacgagcgatcgcccagagccaggagccccaga

SEQ ID NO: 33688 - DNA, 41 bp, Emericella nidulans
gaattcactgcggccgccatgttgccagggacattgcagga

SEQ ID NO: 33689 - DNA, 48 bp, Emericella nidulans
gttctcgagacgagcgatcgcgccagaaatacgtccttcctctaccca

SEQ ID NO: 33690 - DNA, 41 bp, Emericella nidulans
gaattcactgcggccgccatgcgtcgcagtatggcggggtc

SEQ ID NO: 33691 - DNA, 43 bp, Emericella nidulans
gttctcgagacgagcgatcgctcatcccacggctccttgatcc

SEQ ID NO: 33692 - DNA, 42 bp, Emericella nidulans
gaattcactgcggccgccatgtggcgagccccataagccaat

SEQ ID NO: 33693 - DNA, 55 bp, Emericella nidulans
gttctcgagacgagcgatcgcaagattattctcggccttgaacttatcccaggct

SEQ ID NO: 33694 - DNA, 41 bp, Emericella nidulans
gaattcactgcggccgccatgtccagtgccagcgcactacg

SEQ ID NO: 33695 - DNA, 43 bp, Emericella nidulans
gttctcgagacgagcgatcgccagcgagtcctgcagcagcaaa

SEQ ID NO: 33696 - DNA, 40 bp, Emericella nidulans
gaattcactgcggccgccatgctgccggcaccgcgacagt

SEQ ID NO: 33697 - DNA, 46 bp, Emericella nidulans
gttctcgagacgagcgatcgcgtctgtgctgctcagttggagtcct

SEQ ID NO: 33698 - DNA, 53 bp, Emericella nidulans
gaattcactgcggccgccatgtttccagaacagacttggtcttttcttcttcg

SEQ ID NO: 33699 - DNA, 40 bp, Emericella nidulans
gttctcgagacgagcgatcgccgccgctcgacaagcagga

SEQ ID NO: 33700 - DNA, 42 bp, Emericella nidulans
gaattcactgcggccgccatgccggcaagccagcactaacga

SEQ ID NO: 33701 - DNA, 42 bp, Emericella nidulans
gttctcgagacgagcgatcgccggcttgattccgacggagaa

SEQ ID NO: 33702 - DNA, 49 bp, Emericella nidulans
gaattcactgcggccgccatggtcatcagctctatttcctcggcggtgt

SEQ ID NO: 33703 - DNA, 42 bp, Emericella nidulans
gttctcgagacgagcgatcgccgcggcataatccgacatgga

SEQ ID NO: 33704 - DNA, 41 bp, Emericella nidulans
gaattcactgcggccgccatgcctcccgtctggttcgttcg

SEQ ID NO: 33705 - DNA, 41 bp, Emericella nidulans
gttctcgagacgagcgatcgctcgacacccgcgctggaaat

SEQ ID NO: 33706 - DNA, 41 bp, Emericella nidulans
gaattcactgcggccgccatgtccaatggctgcccctctgc

SEQ ID NO: 33707 - DNA, 42 bp, Emericella nidulans
gttctcgagacgagcgatcgccccatacaaaccggccgcaag

SEQ ID NO: 33708 - DNA, 41 bp, Emericella nidulans
gaattcactgcggccgccatggccgttgatgcaggcagtcg

SEQ ID NO: 33709 - DNA, 42 bp, Emericella nidulans
gttctcgagacgagcgatcgcccgcaaatcccagccaatctg

SEQ ID NO: 33710 - DNA, 40 bp, Emericella nidulans
gaattcactgcggccgccatgctcgccccgcagacgcatt

SEQ ID NO: 33711 - DNA, 54 bp, Emericella nidulans
gttctcgagacgagcgatcgcatcaataagacaacaactgaggacctaaggagg

SEQ ID NO: 33712 - DNA, 51 bp, Emericella nidulans
gaattcactgcggccgccatgggtcaatacgagaaatttctaacgcgtctt

SEQ ID NO: 33713 - DNA, 44 bp, Emericella nidulans
gttctcgagacgagcgatcgccggccttgtccatgtcatcttcg

SEQ ID NO: 33714 - DNA, 41 bp, Emericella nidulans
gaattcactgcggccgccatgtgactccggcatcggtcgtg

SEQ ID NO: 33715 - DNA, 54 bp, Emericella nidulans
gttctcgagacgagcgatcgcagcactgcccagagataaaactactatcctgac

SEQ ID NO: 33716 - DNA, 47 bp, Emericella nidulans
gaattcactgcggccgccatgcgggacctaaaacacacactcagtcg

SEQ ID NO: 33717 - DNA, 44 bp, Emericella nidulans
gttctcgagacgagcgatcgctgctctcagcaaacgcccagttc

SEQ ID NO: 33718 - DNA, 41 bp, Emericella nidulans
gaattcactgcggccgccatggcctccgtccctgcgaacac

SEQ ID NO: 33719 - DNA, 51 bp, Emericella nidulans
gttctcgagacgagcgatcgcgaacctattatacggatttgcgaggatatg

SEQ ID NO: 33720 - DNA, 41 bp, Emericella nidulans
gaattcactgcggccgccatgaaaggcgccggctctgcttc

SEQ ID NO: 33721 - DNA, 47 bp, Emericella nidulans
gttctcgagacgagcgatcgccggtccaggcacaacataatctgtca

SEQ ID NO: 33722 - DNA, 41 bp, Emericella nidulans
gaattcactgcggccgccatgccagcagactgccgctctcg

SEQ ID NO: 33723 - DNA, 41 bp, Emericella nidulans
gttctcgagacgagcgatcgcgcggcgtccctgaggatgtt

SEQ ID NO: 33724 - DNA, 42 bp, Emericella nidulans
gaattcactgcggccgccatgtgcacgggcagactgtcatgg

SEQ ID NO: 33725 - DNA, 41 bp, Emericella nidulans
gttctcgagacgagcgatcgccgcgaccctcatttgcgtca

SEQ ID NO: 33726 - DNA, 42 bp, Emericella nidulans
gaattcactgcggccgccatgtgctcatcccgacactgctca

SEQ ID NO: 33727 - DNA, 42 bp, Emericella nidulans
gttctcgagacgagcgatcgctcccagttggcctctcgtgtg

SEQ ID NO: 33728 - DNA, 44 bp, Emericella nidulans
gaattcactgcggccgccatgtcttgcactcacccttctgatcg

SEQ ID NO: 33729 - DNA, 45 bp, Emericella nidulans
gttctcgagacgagcgatcgccagactcgcgtcggaaatagatgc

SEQ ID NO: 33730 - DNA, 51 bp, Emericella nidulans
gaattcactgcggccgccatgtccttgtatcaaacgacgatttcttcactg

SEQ ID NO: 33731 - DNA, 41 bp, Emericella nidulans
gttctcgagacgagcgatcgccgcgccgcaacagactggta

SEQ ID NO: 33732 - DNA, 42 bp, Emericella nidulans
gaattcactgcggccgccatgtcgccatgcagttcttgcaca

SEQ ID NO: 33733 - DNA, 41 bp, Emericella nidulans
gttctcgagacgagcgatcgcgtggcctggcggacagcatc

SEQ ID NO: 33734 - DNA, 42 bp, Emericella nidulans
gaattcactgcggccgccatggggaatacggggctcggtctg

SEQ ID NO: 33735 - DNA, 41 bp, Emericella nidulans
gttctcgagacgagcgatcgcgccgagccacaagcggagtc

SEQ ID NO: 33736 - DNA, 42 bp, Emericella nidulans
gaattcactgcggccgccatgtcgtcggcaactacggcgaaa

SEQ ID NO: 33737 - DNA, 41 bp, Emericella nidulans
gttctcgagacgagcgatcgccacacctccgtccggcacaa

SEQ ID NO: 33738 - DNA, 42 bp, Emericella nidulans
gaattcactgcggccgccatgcgctcagacggttgggaacga

SEQ ID NO: 33739 - DNA, 47 bp, Emericella nidulans
gttctcgagacgagcgatcgccactcctctcgctctatctggcgtgt

SEQ ID NO: 33740 - DNA, 41 bp, Emericella nidulans
gaattcactgcggccgccatgttggctgggcgattcgtgtc

SEQ ID NO: 33741 - DNA, 49 bp, Emericella nidulans
gttctcgagacgagcgatcgccaaccgcataaaatataaccgctgcaca

SEQ ID NO: 33742 - DNA, 42 bp, Emericella nidulans
gaattcactgcggccgccatgcccccatgagcctttcccttg

SEQ ID NO: 33743 - DNA, 41 bp, Emericella nidulans
gttctcgagacgagcgatcgccctccccgcaacacggacac

SEQ ID NO: 33744 - DNA, 53 bp, Emericella nidulans
gaattcactgcggccgccatgtccgaacgacagataaacgctctagaacctaa

SEQ ID NO: 33745 - DNA, 41 bp, Emericella nidulans
gttctcgagacgagcgatcgccatgcgcgcactggaaagga

SEQ ID NO: 33746 - DNA, 46 bp, Emericella nidulans
gaattcactgcggccgccatggctcacgtctcgaattttcttcctc

SEQ ID NO: 33747 - DNA, 55 bp, Emericella nidulans
gttctcgagacgagcgatcgccaattacagagtcttcttctctcccaagaactcc

SEQ ID NO: 33748 - DNA, 42 bp, Emericella nidulans
gaattcactgcggccgccatgggccaaagctcgacgaaccgt

SEQ ID NO: 33749 - DNA, 43 bp, Emericella nidulans
gttctcgagacgagcgatcgccgcggtcctcaattggcttctg

SEQ ID NO: 33750 - DNA, 41 bp, Emericella nidulans
gaattcactgcggccgccatgcgggagaatcaccggcgaca

SEQ ID NO: 33751 - DNA, 41 bp, Emericella nidulans
gttctcgagacgagcgatcgccccgcctcgactgccatcac

SEQ ID NO: 33752 - DNA, 50 bp, Emericella nidulans
gaattcactgcggccgccatgctcaacaagggccacgtatgtatactgat

SEQ ID NO: 33753 - DNA, 45 bp, Emericella nidulans
gttctcgagacgagcgatcgcgctctgctgagcaaaacccattcg

SEQ ID NO: 33754 - DNA, 42 bp, Emericella nidulans
gaattcactgcggccgccatgtggtcggtgatggtgctgtcg

SEQ ID NO: 33755 - DNA, 41 bp, Emericella nidulans
gttctcgagacgagcgatcgccggttcgagtgccgcaacaa

SEQ ID NO: 33756 - DNA, 41 bp, Emericella nidulans
gaattcactgcggccgccatggccggcgtccgaaaagaagg

SEQ ID NO: 33757 - DNA, 42 bp, Emericella nidulans
gttctcgagacgagcgatcgcgggccgccatctcgatgtctt

SEQ ID NO: 33758 - DNA, 44 bp, Emericella nidulans
gaattcactgcggccgccatgtcgaattagccaccgcgatacca

SEQ ID NO: 33759 - DNA, 41 bp, Emericella nidulans
gttctcgagacgagcgatcgcgcatggcaaagcctgccaca

SEQ ID NO: 33760 - DNA, 43 bp, Emericella nidulans
gaattcactgcggccgccatgcccccaaccttcttcccatcca

SEQ ID NO: 33761 - DNA, 45 bp, Emericella nidulans
gttctcgagacgagcgatcgcccgttctcctggaggttcttgtgc

SEQ ID NO: 33762 - DNA, 45 bp, Emericella nidulans
gaattcactgcggccgccatgccgcacaacagttggatggaaagg

SEQ ID NO: 33763 - DNA, 41 bp, Emericella nidulans
gttctcgagacgagcgatcgcgcatcggcgaggtcctccaa

SEQ ID NO: 33764 - DNA, 41 bp, Emericella nidulans
gaattcactgcggccgccatgcacgccgactcggactcgaa

SEQ ID NO: 33765 - DNA, 47 bp, Emericella nidulans
gttctcgagacgagcgatcgctggcctcttttctcaattccttctcc

SEQ ID NO: 33766 - DNA, 41 bp, Emericella nidulans
gaattcactgcggccgccatggagcatgctggcaaggctca

SEQ ID NO: 33767 - DNA, 44 bp, Emericella nidulans
gttctcgagacgagcgatcgcctccttcgtttccttgagctgga

SEQ ID NO: 33768 - DNA, 41 bp, Emericella nidulans
gaattcactgcggccgccatgcgcctcaaggacagcgtgga

SEQ ID NO: 33769 - DNA, 41 bp, Emericella nidulans
gttctcgagacgagcgatcgccaagccaagggcacgaatgg

SEQ ID NO: 33770 - DNA, 41 bp, Emericella nidulans
gaattcactgcggccgccatggacctcggcgtggctctgct

SEQ ID NO: 33771 - DNA, 52 bp, Emericella nidulans
gttctcgagacgagcgatcgcgtccaaagttgataagcatgatagcgaccaa

SEQ ID NO: 33772 - DNA, 46 bp, Emericella nidulans
gaattcactgcggccgccatgggttccagccaaacaacaagactgc

SEQ ID NO: 33773 - DNA, 43 bp, Emericella nidulans
gttctcgagacgagcgatcgctcgcccactcagtacgcttcca

SEQ ID NO: 33774 - DNA, 41 bp, Emericella nidulans
gaattcactgcggccgccatgcgcccccgtgtcaaaccttc

SEQ ID NO: 33775 - DNA, 44 bp, Emericella nidulans
gttctcgagacgagcgatcgctgcaattcacgctcatcggtgtc

SEQ ID NO: 33776 - DNA, 46 bp, Emericella nidulans
gaattcactgcggccgccatggggcgcagagtaaagagaacggaga

SEQ ID NO: 33777 - DNA, 49 bp, Emericella nidulans
gttctcgagacgagcgatcgcaagcccaatctccattagaacttcatcc

SEQ ID NO: 33778 - DNA, 42 bp, Emericella nidulans
gaattcactgcggccgccatggcctggcttgagcgtcgtacc

SEQ ID NO: 33779 - DNA, 44 bp, Emericella nidulans
gttctcgagacgagcgatcgctgcaccatccaatccaatgctga

SEQ ID NO: 33780 - DNA, 41 bp, Emericella nidulans
gaattcactgcggccgccatgtgggagccgcgactcaacct

SEQ ID NO: 33781 - DNA, 41 bp, Emericella nidulans
gttctcgagacgagcgatcgccggtgtcggccctacaggtg

SEQ ID NO: 33782 - DNA, 47 bp, Emericella nidulans
gaattcactgcggccgccatgccatgtcgctctgtttgaatcgtctg

SEQ ID NO: 33783 - DNA, 44 bp, Emericella nidulans
gttctcgagacgagcgatcgcgcggggttttccttgacaacctg

SEQ ID NO: 33784 - DNA, 42 bp, Emericella nidulans
gaattcactgcggccgccatgccgacgaaggaagggacattg

SEQ ID NO: 33785 - DNA, 41 bp, Emericella nidulans
gttctcgagacgagcgatcgcgccaacggacagggatgtca

SEQ ID NO: 33786 - DNA, 42 bp, Emericella nidulans
gaattcactgcggccgccatgcggccctcgggctattcttcc

SEQ ID NO: 33787 - DNA, 42 bp, Emericella nidulans
gttctcgagacgagcgatcgcgccagacaccgagtccgacca

SEQ ID NO: 33788 - DNA, 41 bp, Emericella nidulans
gaattcactgcggccgccatgtgcagaagccgcccgagaac

SEQ ID NO: 33789 - DNA, 51 bp, Emericella nidulans
gttctcgagacgagcgatcgcaatcgaccatgaacatagctgatttgctga

SEQ ID NO: 33790 - DNA, 49 bp, Emericella nidulans
gaattcactgcggccgccatgcatccacaagcatgacttgagcaaatgt

SEQ ID NO: 33791 - DNA, 50 bp, Emericella nidulans
gttctcgagacgagcgatcgcggaggtagatagggcaaggagtaggtaca

SEQ ID NO: 33792 - DNA, 52 bp, Emericella nidulans
gaattcactgcggccgccatgtggtgaatgcgagattttatgatcagttcac

SEQ ID NO: 33793 - DNA, 41 bp, Emericella nidulans
gttctcgagacgagcgatcgctccgatcgcgtagggcaaca

SEQ ID NO: 33794 - DNA, 46 bp, Emericella nidulans
gaattcactgcggccgccatgcctcagtagagctctcggccctagc

SEQ ID NO: 33795 - DNA, 54 bp, Emericella nidulans
gttctcgagacgagcgatcgcagaatagaatacacagctgaagtgaagggcttg

SEQ ID NO: 33796 - DNA, 46 bp, Emericella nidulans
gaattcactgcggccgccatgtcgacaccatggggtagagaaatgc

SEQ ID NO: 33797 - DNA, 49 bp, Emericella nidulans
gttctcgagacgagcgatcgcgttatggatcaactccatcagcgccttg

SEQ ID NO: 33798 - DNA, 42 bp, Emericella nidulans
gaattcactgcggccgccatggccatcgacgaagccgacaga

SEQ ID NO: 33799 - DNA, 46 bp, Emericella nidulans
gttctcgagacgagcgatcgcccctctagcccccttcttttcgtca

SEQ ID NO: 33800 - DNA, 46 bp, Emericella nidulans
gaattcactgcggccgccatgttcaagccggcagttgataccaata

SEQ ID NO: 33801 - DNA, 42 bp, Emericella nidulans
gttctcgagacgagcgatcgctcccgcacagtccgcttagga

SEQ ID NO: 33802 - DNA, 41 bp, Emericella nidulans
gaattcactgcggccgccatgtccgcggaccagggatcaaa

SEQ ID NO: 33803 - DNA, 46 bp, Emericella nidulans
gttctcgagacgagcgatcgctccgtcggacatagttccgtagagc

SEQ ID NO: 33804 - DNA, 53 bp, Emericella nidulans
gaattcactgcggccgccatggcagacatttgagatcatcttttacgtcattg

SEQ ID NO: 33805 - DNA, 41 bp, Emericella nidulans
gttctcgagacgagcgatcgctgctggcgcaggagaacgtg

SEQ ID NO: 33806 - DNA, 41 bp, Emericella nidulans
gaattcactgcggccgccatgcctggctcgtggggcatttg

SEQ ID NO: 33807 - DNA, 42 bp, Emericella nidulans
gttctcgagacgagcgatcgctcgggataatgggcagtagcg

SEQ ID NO: 33808 - DNA, 41 bp, Emericella nidulans
gaattcactgcggccgccatgttgcgactggtgcgcccata

SEQ ID NO: 33809 - DNA, 45 bp, Emericella nidulans
gttctcgagacgagcgatcgcgctctttgaggcctccgacgaagt

SEQ ID NO: 33810 - DNA, 43 bp, Emericella nidulans
gaattcactgcggccgccatgcccgatacaatccacggcgaga

SEQ ID NO: 33811 - DNA, 44 bp, Emericella nidulans
gttctcgagacgagcgatcgccgagatagcccattgccttgacg

SEQ ID NO: 33812 - DNA, 41 bp, Emericella nidulans
gaattcactgcggccgccatggccgcggcgagagtcgaaat

SEQ ID NO: 33813 - DNA, 42 bp, Emericella nidulans
gttctcgagacgagcgatcgctctcgtctccggccgattctg

SEQ ID NO: 33814 - DNA, 41 bp, Emericella nidulans
gaattcactgcggccgccatgcgcggcacagcagtccgaat

SEQ ID NO: 33815 - DNA, 41 bp, Emericella nidulans
gttctcgagacgagcgatcgccaccaatccgtcgccctgga

SEQ ID NO: 33816 - DNA, 45 bp, Emericella nidulans
gaattcactgcggccgccatggccaaagcctgctcaagtatcgaa

SEQ ID NO: 33817 - DNA, 45 bp, Emericella nidulans
gttctcgagacgagcgatcgctgtcctttgctggaaagacgcaat

SEQ ID NO: 33818 - DNA, 41 bp, Emericella nidulans
gaattcactgcggccgccatgcgcggcttcaacgcagtcaa

SEQ ID NO: 33819 - DNA, 47 bp, Emericella nidulans
gttctcgagacgagcgatcgctcgatacaccagcactactggcaagg

SEQ ID NO: 33820 - DNA, 41 bp, Emericella nidulans; identical to SEQ ID NO: 33280

SEQ ID NO: 33821 - DNA, 46 bp, Emericella nidulans
gttctcgagacgagcgatcgcgctcagcactggtctgaagcccttt

SEQ ID NO: 33822 - DNA, 41 bp, Emericella nidulans
gaattcactgcggccgccatgaaagcgccgcaaggtcaacg

SEQ ID NO: 33823 - DNA, 45 bp, Emericella nidulans
gttctcgagacgagcgatcgcgcgtcagcgttcttgctatcgtga

SEQ ID NO: 33824 - DNA, 55 bp, Emericella nidulans
gaattcactgcggccgccatggcaaatcagagaacgatccaaaatatgttactga

SEQ ID NO: 33825 - DNA, 41 bp, Emericella nidulans
gttctcgagacgagcgatcgctggcagcgcccttgacgtag

SEQ ID NO: 33826 - DNA, 41 bp, Emericella nidulans
gaattcactgcggccgccatgtgcttttggccgcatcacca

SEQ ID NO: 33827 - DNA, 41 bp, Emericella nidulans
gttctcgagacgagcgatcgccctcgctcgaagctgtcacg

SEQ ID NO: 33828 - DNA, 41 bp, Emericella nidulans
gaattcactgcggccgccatggccagatcgctgcggttcct

SEQ ID NO: 33829 - DNA, 42 bp, Emericella nidulans
gttctcgagacgagcgatcgcccgcgtgcattacatcctcca

SEQ ID NO: 33830 - DNA, 41 bp, Emericella nidulans
gaattcactgcggccgccatgcgccgaagccgatccttcct

SEQ ID NO: 33831 - DNA, 48 bp, Emericella nidulans
gttctcgagacgagcgatcgccgagatagttgagggttttggaagtct

SEQ ID NO: 33832 - DNA, 42 bp, Emericella nidulans
gaattcactgcggccgccatgggctggtgtttttgccggctc

SEQ ID NO: 33833 - DNA, 44 bp, Emericella nidulans
gttctcgagacgagcgatcgctccgagacacctgaacgagctga

SEQ ID NO: 33834 - DNA, 43 bp, Emericella nidulans
gaattcactgcggccgccatgcccgctgtggaaagaggtgagg

SEQ ID NO: 33835 - DNA, 46 bp, Emericella nidulans
gttctcgagacgagcgatcgctatctgggtgaggcaccgcctcgaa

SEQ ID NO: 33836 - DNA, 41 bp, Emericella nidulans
gaattcactgcggccgccatgtgcccctcgcgcatgagaat

SEQ ID NO: 33837 - DNA, 41 bp, Emericella nidulans
gttctcgagacgagcgatcgcagccgtcgcgacctctgcaa

SEQ ID NO: 33838 - DNA, 41 bp, Emericella nidulans
gaattcactgcggccgccatgaggcgagcgccaagaatccc

SEQ ID NO: 33839 - DNA, 43 bp, Emericella nidulans
gttctcgagacgagcgatcgcggcggcaatggtaacctcaacc

SEQ ID NO: 33840 - DNA, 41 bp, Emericella nidulans
gaattcactgcggccgccatgccggtggcacctggttcgat

SEQ ID NO: 33841 - DNA, 41 bp, Emericella nidulans
gttctcgagacgagcgatcgcttcgcctccttgcgctcctg

SEQ ID NO: 33842 - DNA, 52 bp, Emericella nidulans
gaattcactgcggccgccatgtaccaggaaatgtcatctattttgccggata

SEQ ID NO: 33843 - DNA, 42 bp, Emericella nidulans
gttctcgagacgagcgatcgcgccgtcgctcattgacatccc

SEQ ID NO: 33844 - DNA, 57 bp, Emericella nidulans
gaattcactgcggccgccatgcctagtattatctatacacaaatattgaccccatcc

SEQ ID NO: 33845 - DNA, 41 bp, Emericella nidulans
gttctcgagacgagcgatcgcgccgcccgaacagacatcgt

SEQ ID NO: 33846 - DNA, 50 bp, Emericella nidulans
gaattcactgcggccgccatgtgtcattatctccctactcgtactgacca

SEQ ID NO: 33847 - DNA, 42 bp, Emericella nidulans
gttctcgagacgagcgatcgccgccggtaccacatgcgagtt

SEQ ID NO: 33848 - DNA, 45 bp, Emericella nidulans
gaattcactgcggccgccatggccacgatccttcactgtttgggt

SEQ ID NO: 33849 - DNA, 41 bp, Emericella nidulans
gttctcgagacgagcgatcgcgcgccaagcttagccggtca

SEQ ID NO: 33850 - DNA, 41 bp, Emericella nidulans
gaattcactgcggccgccatggccgaggccgtcaacgacaa

SEQ ID NO: 33851 - DNA, 49 bp, Emericella nidulans
gttctcgagacgagcgatcgcggcctggaggctctccagaacctataat

SEQ ID NO: 33852 - DNA, 55 bp, Emericella nidulans
gaattcactgcggccgccatgtctactgatattgagaacattctttttgaagcct

SEQ ID NO: 33853 - DNA, 41 bp, Emericella nidulans
gttctcgagacgagcgatcgcggggaggggccgtacccttt

SEQ ID NO: 33854 - DNA, 43 bp, Emericella nidulans
gaattcactgcggccgccatgccgcaacccttccctgtctagc

SEQ ID NO: 33855 - DNA, 42 bp, Emericella nidulans
gttctcgagacgagcgatcgcggcctggggagggttcagctt

SEQ ID NO: 33856 - DNA, 40 bp, Emericella nidulans
gaattcactgcggccgccatgcgcgccacgaaatggaacg

SEQ ID NO: 33857 - DNA, 41 bp, Emericella nidulans
gttctcgagacgagcgatcgcctgccgttcgcttcggcttc

SEQ ID NO: 33858 - DNA, 42 bp, Emericella nidulans
gaattcactgcggccgccatggcctctccaggcgaagggttg

SEQ ID NO: 33859 - DNA, 48 bp, Emericella nidulans
gttctcgagacgagcgatcgccaaatggccactgagaatactcggcta

SEQ ID NO: 33860 - DNA, 56 bp, Emericella nidulans
gaattcactgcggccgccatgcactctacacccataacgtatgttcttacacctca

SEQ ID NO: 33861 - DNA, 55 bp, Emericella nidulans
gttctcgagacgagcgatcgctatatcctctggaatctctaactcaagtcccaaa

SEQ ID NO: 33862 - DNA, 43 bp, Emericella nidulans
gaattcactgcggccgccatgcaatgcaggcgcgtctactcca

SEQ ID NO: 33863 - DNA, 41 bp, Emericella nidulans
gttctcgagacgagcgatcgccgtcctcctcgccctcgtca

SEQ ID NO: 33864 - DNA, 41 bp, Emericella nidulans
gaattcactgcggccgccatgcaacctctcgcgcctgcaaa

SEQ ID NO: 33865 - DNA, 43 bp, Emericella nidulans
gttctcgagacgagcgatcgctgggaacaggttgaagggagca

SEQ ID NO: 33866 - DNA, 44 bp, Emericella nidulans
gaattcactgcggccgccatgccctctatccctgctgctgccac

SEQ ID NO: 33867 - DNA, 41 bp, Emericella nidulans
gttctcgagacgagcgatcgccttccccgcggcacctttct

SEQ ID NO: 33868 - DNA, 42 bp, Emericella nidulans
gaattcactgcggccgccatgtcaacaaccggcgttgaagca

SEQ ID NO: 33869 - DNA, 48 bp, Emericella nidulans
gttctcgagacgagcgatcgcaattgtgcacaaaaccatcaactctcc

SEQ ID NO: 33870 - DNA, 41 bp, Emericella nidulans
gaattcactgcggccgccatgaccccgcgcctggtaacgat

SEQ ID NO: 33871 - DNA, 41 bp, Emericella nidulans
gttctcgagacgagcgatcgcgcatgtccgcagctcctcca

SEQ ID NO: 33872 - DNA, 41 bp, Emericella nidulans
gaattcactgcggccgccatgcacaaccgcgagcccatcac

SEQ ID NO: 33873 - DNA, 44 bp, Emericella nidulans
gttctcgagacgagcgatcgctgagcaagcctgaaagccaaacg

SEQ ID NO: 33874 - DNA, 44 bp, Emericella nidulans
gaattcactgcggccgccatgcgatcgcatctgtcgaaaaggga

SEQ ID NO: 33875 - DNA, 42 bp, Emericella nidulans
gttctcgagacgagcgatcgctgctcaggcttgggatcaaca

SEQ ID NO: 33876 - DNA, 50 bp, Emericella nidulans
gaattcactgcggccgccatgaagctttggaaagctctacacgtacaagg

SEQ ID NO: 33877 - DNA, 41 bp, Emericella nidulans
gttctcgagacgagcgatcgccggcaagccctcctcgacaa

SEQ ID NO: 33878 - DNA, 41 bp, Emericella nidulans
gaattcactgcggccgccatgcctccccatgacgcggtttg

SEQ ID NO: 33879 - DNA, 44 bp, Emericella nidulans
gttctcgagacgagcgatcgctcaacccctccaggcgtctaatg

SEQ ID NO: 33880 - DNA, 51 bp, Emericella nidulans
gaattcactgcggccgccatgctcactaacaaactgatacagcgccatttg

SEQ ID NO: 33881 - DNA, 43 bp, Emericella nidulans
gttctcgagacgagcgatcgccgcaagttgctccttgcggaaa

SEQ ID NO: 33882 - DNA, 45 bp, Emericella nidulans
gaattcactgcggccgccatggcccaatatgatcaaccgcacaca

SEQ ID NO: 33883 - DNA, 41 bp, Emericella nidulans
gttctcgagacgagcgatcgctccaccccaacggcgttctc

SEQ ID NO: 33884 - DNA, 41 bp, Emericella nidulans
gaattcactgcggccgccatggaacatcgccccctggctca

SEQ ID NO: 33885 - DNA, 41 bp, Emericella nidulans
gttctcgagacgagcgatcgccgcgccttgtgaatccccac

SEQ ID NO: 33886 - DNA, 55 bp, Emericella nidulans
gaattcactgcggccgccatgtggatactaccattagtagggtatctgggagtga

SEQ ID NO: 33887 - DNA, 43 bp, Emericella nidulans
gttctcgagacgagcgatcgcccccatcaattccccgttttca

SEQ ID NO: 33888 - DNA, 42 bp, Emericella nidulans
gaattcactgcggccgccatgcggtcccgcttctcgttttgg

SEQ ID NO: 33889 - DNA, 47 bp, Emericella nidulans
gttctcgagacgagcgatcgcccatggctcgtgttttatccacatcc

SEQ ID NO: 33890 - DNA, 41 bp, Emericella nidulans
gaattcactgcggccgccatgtgcgccagaatgtcgagcag

SEQ ID NO: 33891 - DNA, 41 bp, Emericella nidulans
gttctcgagacgagcgatcgcgacacggcggggaggagaca

SEQ ID NO: 33892 - DNA, 42 bp, Emericella nidulans
gaattcactgcggccgccatgtcacgctcccaaccaacacga

SEQ ID NO: 33893 - DNA, 46 bp, Emericella nidulans
gttctcgagacgagcgatcgcccgaatctttttcgccttcagcttg

SEQ ID NO: 33894 - DNA, 43 bp, Emericella nidulans
gaattcactgcggccgccatggctcccaagatcgccatcgtct

SEQ ID NO: 33895 - DNA, 48 bp, Emericella nidulans
gttctcgagacgagcgatcgcgaagttgacacgagagacgtgctcata

SEQ ID NO: 33896 - DNA, 41 bp, Emericella nidulans
gaattcactgcggccgccatggttcgacggcgcaggcggta

SEQ ID NO: 33897 - DNA, 41 bp, Emericella nidulans
gttctcgagacgagcgatcgctgaatctggcacggccaccc

SEQ ID NO: 33898 - DNA, 41 bp, Emericella nidulans
gaattcactgcggccgccatgcgggcgcttgacaggacaca

SEQ ID NO: 33899 - DNA, 44 bp, Emericella nidulans
gttctcgagacgagcgatcgccaagccttgcttggaggtcgtca

SEQ ID NO: 33900 - DNA, 43 bp, Emericella nidulans
gaattcactgcggccgccatggcatcaggccttctcggttcca

SEQ ID NO: 33901 - DNA, 57 bp, Emericella nidulans
gttctcgagacgagcgatcgctcgaaactacaggatatccagaaatcaggaaactta

SEQ ID NO: 33902 - DNA, 51 bp, Emericella nidulans
gaattcactgcggccgccatgatgtctactccaaacatccctcatcaaggt

SEQ ID NO: 33903 - DNA, 42 bp, Emericella nidulans
gttctcgagacgagcgatcgctgcacgtgcctgagcctgaga

SEQ ID NO: 33904 - DNA, 41 bp, Emericella nidulans
gaattcactgcggccgccatgtgcatggtttggcggcaatg

SEQ ID NO: 33905 - DNA, 43 bp, Emericella nidulans
gttctcgagacgagcgatcgccctgctctccagcaagttcgtc

SEQ ID NO: 33906 - DNA, 42 bp, Emericella nidulans
gaattcactgcggccgccatgtgccgaatgtctacggcgtgt

SEQ ID NO: 33907 - DNA, 41 bp, Emericella nidulans
gttctcgagacgagcgatcgctgcgccgcgtactctccctc

SEQ ID NO: 33908 - DNA, 41 bp, Emericella nidulans
gaattcactgcggccgccatgggccccatctctcgggcaat

SEQ ID NO: 33909 - DNA, 42 bp, Emericella nidulans
gttctcgagacgagcgatcgccattccccatccaagcgctca

SEQ ID NO: 33910 - DNA, 53 bp, Emericella nidulans
gaattcactgcggccgccatgtctacattcaccagctatgaactatgcagcta

SEQ ID NO: 33911 - DNA, 41 bp, Emericella nidulans
gttctcgagacgagcgatcgcctgcgctcgcttcccctcag

SEQ ID NO: 33912 - DNA, 41 bp, Emericella nidulans
gaattcactgcggccgccatgccaggtcgtgcgagccctct

SEQ ID NO: 33913 - DNA, 41 bp, Emericella nidulans
gttctcgagacgagcgatcgcctgccggcatctgcatccct

SEQ ID NO: 33914 - DNA, 41 bp, Emericella nidulans
gaattcactgcggccgccatgcattcgccatgccagaccca

SEQ ID NO: 33915 - DNA, 41 bp, Emericella nidulans
gttctcgagacgagcgatcgcgcgtccgcatctgcgcgtaa

SEQ ID NO: 33916 - DNA, 41 bp, Emericella nidulans
gaattcactgcggccgccatggtgtcgcggcgctcgtcttc

SEQ ID NO: 33917 - DNA, 41 bp, Emericella nidulans
gttctcgagacgagcgatcgctgatgctcttcggccgctca

SEQ ID NO: 33918 - DNA, 41 bp, Emericella nidulans
gaattcactgcggccgccatgggggattcgaaacccggtcc

SEQ ID NO: 33919 - DNA, 41 bp, Emericella nidulans
gttctcgagacgagcgatcgccagtggccgtcccgtgaaga

SEQ ID NO: 33920 - DNA, 41 bp, Emericella nidulans
gaattcactgcggccgccatgcgacaccgcgaacaccctcc

SEQ ID NO: 33921 - DNA, 43 bp, Emericella nidulans
gttctcgagacgagcgatcgccgtgctgctggccacaaggata

SEQ ID NO: 33922 - DNA, 45 bp, Emericella nidulans
gaattcactgcggccgccatgtcgtttacacacccatggttccaa

SEQ ID NO: 33923 - DNA, 42 bp, Emericella nidulans
gttctcgagacgagcgatcgctccctgtctcggggctgttcc

SEQ ID NO: 33924 - DNA, 42 bp, Emericella nidulans
gaattcactgcggccgccatgccgcattcctccatccccaac

SEQ ID NO: 33925 - DNA, 50 bp, Emericella nidulans
gttctcgagacgagcgatcgctggctgtctccataagtagatacccgtga

SEQ ID NO: 33926 - DNA, 41 bp, Emericella nidulans
gaattcactgcggccgccatgtcattgccctccctggcgta

SEQ ID NO: 33927 - DNA, 53 bp, Emericella nidulans
gttctcgagacgagcgatcgcctacatattcccaatcaacctcagaatacctc

SEQ ID NO: 33928 - DNA, 43 bp, Emericella nidulans
gaattcactgcggccgccatgtggacgccctcacatttccctc

SEQ ID NO: 33929 - DNA, 42 bp, Emericella nidulans
gttctcgagacgagcgatcgcccgatccttccgcagaggaca

SEQ ID NO: 33930 - DNA, 42 bp, Emericella nidulans
gaattcactgcggccgccatgccaggtcgtcgacgccatcaa

SEQ ID NO: 33931 - DNA, 48 bp, Emericella nidulans
gttctcgagacgagcgatcgctgttttggaaagactcaccttgggagc

SEQ ID NO: 33932 - DNA, 41 bp, Emericella nidulans
gaattcactgcggccgccatgtcgactttgatgcggggtgg

SEQ ID NO: 33933 - DNA, 45 bp, Emericella nidulans
gttctcgagacgagcgatcgcccggcggaggatatactttgacca

SEQ ID NO: 33934 - DNA, 41 bp, Emericella nidulans
gaattcactgcggccgccatgcggccaatgggtcgcagaag

SEQ ID NO: 33935 - DNA, 41 bp, Emericella nidulans
gttctcgagacgagcgatcgctgcggcggatgacgaacttg

SEQ ID NO: 33936 - DNA, 46 bp, Emericella nidulans
gaattcactgcggccgccatgtcttggttcttgatgaaaggcttcg

SEQ ID NO: 33937 - DNA, 52 bp, Emericella nidulans
gttctcgagacgagcgatcgctttattgtagtagattggagcacagcgtaca

SEQ ID NO: 33938 - DNA, 45 bp, Emericella nidulans
gaattcactgcggccgccatgatgcagcagtacgtgcttctctcc

SEQ ID NO: 33939 - DNA, 50 bp, Emericella nidulans
gttctcgagacgagcgatcgccatttacgccttcttagcaatgtcctcca

SEQ ID NO: 33940 - DNA, 41 bp, Emericella nidulans
gaattcactgcggccgccatgtgccctccattgtgccttcg

SEQ ID NO: 33941 - DNA, 41 bp, Emericella nidulans
gttctcgagacgagcgatcgctcggtaaggcgcatcggctc

SEQ ID NO: 33942 - DNA, 42 bp, Emericella nidulans
gaattcactgcggccgccatgtggatcgttgaccacgcaagg

SEQ ID NO: 33943 - DNA, 41 bp, Emericella nidulans
gttctcgagacgagcgatcgcaccaggcgctcgaagggacc

SEQ ID NO: 33944 - DNA, 41 bp, Emericella nidulans
gaattcactgcggccgccatgacccccgacggcgttgagat

SEQ ID NO: 33945 - DNA, 41 bp, Emericella nidulans
gttctcgagacgagcgatcgcgaacgcctccggctgctcaa

SEQ ID NO: 33946 - DNA, 46 bp, Emericella nidulans
gaattcactgcggccgccatgctccttttcgactgtcggacttttg

SEQ ID NO: 33947 - DNA, 41 bp, Emericella nidulans
gttctcgagacgagcgatcgcgcaggcagggcaaccgaaaa

SEQ ID NO: 33948 - DNA, 41 bp, Emericella nidulans
gaattcactgcggccgccatgtcgccccgttcctgtcgttc

SEQ ID NO: 33949 - DNA, 43 bp, Emericella nidulans
gttctcgagacgagcgatcgcggcagcctttcagcttcgacca

SEQ ID NO: 33950 - DNA, 43 bp, Emericella nidulans
gaattcactgcggccgccatgagtgccggatatgcaaagcatc

SEQ ID NO: 33951 - DNA, 45 bp, Emericella nidulans
gttctcgagacgagcgatcgcatcctctggtttttccggatgagg

SEQ ID NO: 33952 - DNA, 45 bp, Emericella nidulans
gaattcactgcggccgccatgccgtcaccgagatcacatacacga

SEQ ID NO: 33953 - DNA, 41 bp, Emericella nidulans
gttctcgagacgagcgatcgcacggtctgcgacggcgtgtt

SEQ ID NO: 33954 - DNA, 45 bp, Emericella nidulans
gaattcactgcggccgccatggcccaatcaagaatcaagaagctg

SEQ ID NO: 33955 - DNA, 42 bp, Emericella nidulans
gttctcgagacgagcgatcgcgccagcctcgtctgcttgtgc

SEQ ID NO: 33956 - DNA, 41 bp, Emericella nidulans
gaattcactgcggccgccatgtccagagcgggctcgaaatg

SEQ ID NO: 33957 - DNA, 41 bp, Emericella nidulans
gttctcgagacgagcgatcgccggagtgcgacgtgccagtt

SEQ ID NO: 33958 - DNA, 43 bp, Emericella nidulans
gaattcactgcggccgccatgtcagtcacgcattcgacgaggc

SEQ ID NO: 33959 - DNA, 42 bp, Emericella nidulans
gttctcgagacgagcgatcgcccctctgcaggctgcaaccac

SEQ ID NO: 33960 - DNA, 41 bp, Emericella nidulans
gaattcactgcggccgccatgcggtccggctgatggtcgat

SEQ ID NO: 33961 - DNA, 40 bp, Emericella nidulans
gttctcgagacgagcgatcgccgcggccccgatcttcttc

SEQ ID NO: 33962 - DNA, 44 bp, Emericella nidulans
gaattcactgcggccgccatgccaaggacactgctcctcaccgt

SEQ ID NO: 33963 - DNA, 41 bp, Emericella nidulans
gttctcgagacgagcgatcgctgtgaacagcaccgcgcaga

SEQ ID NO: 33964 - DNA, 41 bp, Emericella nidulans
gaattcactgcggccgccatgcatcccaacccgccgtgaac

SEQ ID NO: 33965 - DNA, 41 bp, Emericella nidulans
gttctcgagacgagcgatcgctgctgatggcggatccttcg

SEQ ID NO: 33966 - DNA, 41 bp, Emericella nidulans
gaattcactgcggccgccatgggccgcgtctacgccatcac

SEQ ID NO: 33967 - DNA, 46 bp, Emericella nidulans
gttctcgagacgagcgatcgcccccatcaatcagcattgtactccc

SEQ ID NO: 33968 - DNA, 41 bp, Emericella nidulans
gaattcactgcggccgccatgatggcgagacggacaggtgc

SEQ ID NO: 33969 - DNA, 42 bp, Emericella nidulans
gttctcgagacgagcgatcgcgtcgctcctttggcacggaca

SEQ ID NO: 33970 - DNA, 41 bp, Emericella nidulans
gaattcactgcggccgccatgccgccgcgatcatgaaggac

SEQ ID NO: 33971 - DNA, 44 bp, Emericella nidulans
gttctcgagacgagcgatcgcgcttctgccgcactttgtcatgg

SEQ ID NO: 33972 - DNA, 42 bp, Emericella nidulans
gaattcactgcggccgccatggcgccaagttgtttgggcttg

SEQ ID NO: 33973 - DNA, 57 bp, Emericella nidulans
gttctcgagacgagcgatcgctcatttaaattagtacttcagtacttgggtcgcttg

SEQ ID NO: 33974 - DNA, 46 bp, Emericella nidulans
gaattcactgcggccgccatggccgatcaaacacttcctggtcgat

SEQ ID NO: 33975 - DNA, 42 bp, Emericella nidulans
gttctcgagacgagcgatcgcgggcccacttctcgagtctgc

SEQ ID NO: 33976 - DNA, 41 bp, Emericella nidulans
gaattcactgcggccgccatgcgttgaagcccaacggagca

SEQ ID NO: 33977 - DNA, 41 bp, Emericella nidulans
gttctcgagacgagcgatcgccgcagcaaaggccccaacaa

SEQ ID NO: 33978 - DNA, 41 bp, Emericella nidulans
gaattcactgcggccgccatgtgcacacaactgccggggta

SEQ ID NO: 33979 - DNA, 51 bp, Emericella nidulans
gttctcgagacgagcgatcgcaagcaaagaagatatcgtattcacaaccaa

SEQ ID NO: 33980 - DNA, 43 bp, Emericella nidulans
gaattcactgcggccgccatgcgggattcaaggcctgcagatg

SEQ ID NO: 33981 - DNA, 48 bp, Emericella nidulans
gttctcgagacgagcgatcgcagcactttcgagtatttttaggccaga

SEQ ID NO: 33982 - DNA, 41 bp, Emericella nidulans
gaattcactgcggccgccatggccgcgccttgatgaacctc

SEQ ID NO: 33983 - DNA, 41 bp, Emericella nidulans
gttctcgagacgagcgatcgcctggcgcgtctgaggattgc

SEQ ID NO: 33984 - DNA, 42 bp, Emericella nidulans
gaattcactgcggccgccatgcgacccattggcatgggaagc

SEQ ID NO: 33985 - DNA, 41 bp, Emericella nidulans
gttctcgagacgagcgatcgccctcccgccgtggttggata

SEQ ID NO: 33986 - DNA, 52 bp, Emericella nidulans
gaattcactgcggccgccatgaactcctccataatgacaactttcaaactca

SEQ ID NO: 33987 - DNA, 43 bp, Emericella nidulans
gttctcgagacgagcgatcgcggtttgccttgatccgctctgg

SEQ ID NO: 33988 - DNA, 41 bp, Emericella nidulans
gaattcactgcggccgccatgctcgttgcccccgaggaggt

SEQ ID NO: 33989 - DNA, 41 bp, Emericella nidulans
gttctcgagacgagcgatcgccgtcggcaatagcccggaca

SEQ ID NO: 33990 - DNA, 43 bp, Emericella nidulans
gaattcactgcggccgccatgcgccccgatcgatatggatgac

SEQ ID NO: 33991 - DNA, 41 bp, Emericella nidulans
gttctcgagacgagcgatcgcgcgtgccgatcccctggatt

SEQ ID NO: 33992 - DNA, 55 bp, Emericella nidulans
gaattcactgcggccgccatggagattcacgtacaggccatctacgtcaacaagg

SEQ ID NO: 33993 - DNA, 41 bp, Emericella nidulans
gttctcgagacgagcgatcgcgccgcaaccttgaacggagc

SEQ ID NO: 33994 - DNA, 43 bp, Emericella nidulans
gaattcactgcggccgccatgcggtcattgtttcgaccgagga

SEQ ID NO: 33995 - DNA, 41 bp, Emericella nidulans
gttctcgagacgagcgatcgcgcctgctgctggcttctcat

SEQ ID NO: 33996 - DNA, 41 bp, Emericella nidulans
gaattcactgcggccgccatgacggcgtcgtcctcgtcaca

SEQ ID NO: 33997 - DNA, 41 bp, Emericella nidulans
gttctcgagacgagcgatcgcgccccgctcaacccactcct

SEQ ID NO: 33998 - DNA, 45 bp, Emericella nidulans
gaattcactgcggccgccatgcgctggatacgatgaggagcaggt

SEQ ID NO: 33999 - DNA, 42 bp, Emericella nidulans
gttctcgagacgagcgatcgcccaaggtggctccaccactca

SEQ ID NO: 34000 - DNA, 48 bp, Emericella nidulans
gaattcactgcggccgccatgtgcgtgcaaattatctcaatgatcgtg

SEQ ID NO: 34001 - DNA, 49 bp, Emericella nidulans
gttctcgagacgagcgatcgcttaacagtctctactgccagccatatca

SEQ ID NO: 34002 - DNA, 49 bp, Emericella nidulans
gaattcactgcggccgccatgagccaagaaaagtgctagatgtcagtca

SEQ ID NO: 34003 - DNA, 46 bp, Emericella nidulans
gttctcgagacgagcgatcgcagcatgcgaatattctttccagtca

SEQ ID NO: 34004 - DNA, 41 bp, Emericella nidulans
gaattcactgcggccgccatgtggcaatgcaagctccggta

SEQ ID NO: 34005 - DNA, 41 bp, Emericella nidulans
gttctcgagacgagcgatcgcccgcatgactgggcagaacg

SEQ ID NO: 34006 - DNA, 52 bp, Emericella nidulans
gaattcactgcggccgccatggaccctgaataaagcaaaatgagacttttcc

SEQ ID NO: 34007 - DNA, 43 bp, Emericella nidulans
gttctcgagacgagcgatcgcggagagatcgatggccgtctcg

SEQ ID NO: 34008 - DNA, 51 bp, Emericella nidulans
gaattcactgcggccgccatgagcataaacgcaaacactttcaaaattatc

SEQ ID NO: 34009 - DNA, 41 bp, Emericella nidulans
gttctcgagacgagcgatcgcggcagcctcacggggcaact

SEQ ID NO: 34010 - DNA, 39 bp, Emericella nidulans
gaattcactgcggccgccatggccccggcgtgtcctcct

SEQ ID NO: 34011 - DNA, 41 bp, Emericella nidulans
gttctcgagacgagcgatcgcccgtgatctgcgcctctccc

SEQ ID NO: 34012 - DNA, 41 bp, Emericella nidulans
gaattcactgcggccgccatgggcagaagcgctggaggtgc

SEQ ID NO: 34013 - DNA, 46 bp, Emericella nidulans
gttctcgagacgagcgatcgccagggtgctctagacccagcacttg

SEQ ID NO: 34014 - DNA, 41 bp, Emericella nidulans
gaattcactgcggccgccatgcttttccggtcgcggtggag

SEQ ID NO: 34015 - DNA, 41 bp, Emericella nidulans
gttctcgagacgagcgatcgcctcccctaccgccagcacca

SEQ ID NO: 34016 - DNA, 41 bp, Emericella nidulans
gaattcactgcggccgccatggcgatggccgctggaataca

SEQ ID NO: 34017 - DNA, 45 bp, Emericella nidulans
gttctcgagacgagcgatcgccaccggtcatcaccgactatcacg

SEQ ID NO: 34018 - DNA, 41 bp, Emericella nidulans
gaattcactgcggccgccatggccaaagaacccgcgcactg

SEQ ID NO: 34019 - DNA, 42 bp, Emericella nidulans
gttctcgagacgagcgatcgctgcacccgaccaaccttgtca

SEQ ID NO: 34020 - DNA, 41 bp, Emericella nidulans
gaattcactgcggccgccatgggcgagttcgtcggcacgtt

SEQ ID NO: 34021 - DNA, 42 bp, Emericella nidulans
gttctcgagacgagcgatcgcccccatttcgcctcccactca

SEQ ID NO: 34022 - DNA, 43 bp, Emericella nidulans
gaattcactgcggccgccatgtcctgggaaggcgagaagatcc

SEQ ID NO: 34023 - DNA, 42 bp, Emericella nidulans
gttctcgagacgagcgatcgcacagccgggttctcggcaaca

SEQ ID NO: 34024 - DNA, 41 bp, Emericella nidulans; identical to SEQ ID NO: 29606

SEQ ID NO: 34025 - DNA, 43 bp, Emericella nidulans
gttctcgagacgagcgatcgctgaccaactccagcaccatccc

SEQ ID NO: 34026 - DNA, 41 bp, Emericella nidulans
gaattcactgcggccgccatgaggagcgcccggatcgattt

SEQ ID NO: 34027 - DNA, 49 bp, Emericella nidulans
gttctcgagacgagcgatcgcccttatacggacccaacctaaacagtcg

SEQ ID NO: 34028 - DNA, 41 bp, Emericella nidulans
gaattcactgcggccgccatgcgctggcgcttagtgattcg

SEQ ID NO: 34029 - DNA, 41 bp, Emericella nidulans
gttctcgagacgagcgatcgctcgccctctcggcactcgat

SEQ ID NO: 34030 - DNA, 50 bp, Emericella nidulans
gaattcactgcggccgccatggatttgaataggaaacatatccgagaagc

SEQ ID NO: 34031 - DNA, 56 bp, Emericella nidulans
gttctcgagacgagcgatcgcgaactgattcgtatgtcataaagttcaagccaacc

SEQ ID NO: 34032 - DNA, 50 bp, Emericella nidulans
gaattcactgcggccgccatgtacggaggctacgagtatttcaagaagtt

SEQ ID NO: 34033 - DNA, 41 bp, Emericella nidulans
gttctcgagacgagcgatcgctgtggttggcaggcccatga

SEQ ID NO: 34034 - DNA, 43 bp, Emericella nidulans
gaattcactgcggccgccatgggaaagaaccggaagcccgtgt

SEQ ID NO: 34035 - DNA, 41 bp, Emericella nidulans
gttctcgagacgagcgatcgcgtccggtcaccggctcgact

SEQ ID NO: 34036 - DNA, 41 bp, Emericella nidulans
gaattcactgcggccgccatggcggctacgacatgcccctc

SEQ ID NO: 34037 - DNA, 41 bp, Emericella nidulans
gttctcgagacgagcgatcgctcccctctgtgtcgcccacc

SEQ ID NO: 34038 - DNA, 43 bp, Emericella nidulans
gaattcactgcggccgccatgtgcgcaacctacagcttcacca

SEQ ID NO: 34039 - DNA, 41 bp, Emericella nidulans
gttctcgagacgagcgatcgccttcacaacggcccgccttc

SEQ ID NO: 34040 - DNA, 41 bp, Emericella nidulans
gaattcactgcggccgccatggcaaccctcggcagcgaatg

SEQ ID NO: 34041 - DNA, 41 bp, Emericella nidulans
gttctcgagacgagcgatcgcaaccgcatcgcgcagcttct

SEQ ID NO: 34042 - DNA, 41 bp, Emericella nidulans
gaattcactgcggccgccatgtcacaaccatggcggactcg

SEQ ID NO: 34043 - DNA, 42 bp, Emericella nidulans
gttctcgagacgagcgatcgctgctccggcttatgcgtcgtc

SEQ ID NO: 34044 - DNA, 42 bp, Emericella nidulans
gaattcactgcggccgccatgtggcatacgcgtgtccaggaa

SEQ ID NO: 34045 - DNA, 41 bp, Emericella nidulans
gttctcgagacgagcgatcgcaccgggtggtgcatcggttc

SEQ ID NO: 34046 - DNA, 52 bp, Emericella nidulans
gaattcactgcggccgccatgaaaatatgtttcagaactttggagatcttgg

SEQ ID NO: 34047 - DNA, 42 bp, Emericella nidulans
gttctcgagacgagcgatcgcccaggtgagctggcgttgacc

SEQ ID NO: 34048 - DNA, 51 bp, Emericella nidulans
gaattcactgcggccgccatgcgaccagactagaaacaaaacatgtcattc

SEQ ID NO: 34049 - DNA, 41 bp, Emericella nidulans
gttctcgagacgagcgatcgcggcgtcacccacgcatcctt

SEQ ID NO: 34050 - DNA, 50 bp, Emericella nidulans
gaattcactgcggccgccatggagctcttcgcaatatcaatacctcagca

SEQ ID NO: 34051 - DNA, 52 bp, Emericella nidulans
gttctcgagacgagcgatcgcataatttcaccctctaaatctcgctctaacc

SEQ ID NO: 34052 - DNA, 41 bp, Emericella nidulans
gaattcactgcggccgccatggctcgcggtcctgcagtcct

SEQ ID NO: 34053 - DNA, 44 bp, Emericella nidulans
gttctcgagacgagcgatcgctgtcctgaaggtagcggcactca

SEQ ID NO: 34054 - DNA, 41 bp, Emericella nidulans
gaattcactgcggccgccatgccctccgcacgaaccgaaga

SEQ ID NO: 34055 - DNA, 49 bp, Emericella nidulans
gttctcgagacgagcgatcgcgcgtaggaccaatcttcttcagcttaca

SEQ ID NO: 34056 - DNA, 41 bp, Emericella nidulans
gaattcactgcggccgccatggtgccgccggtgacaaggag

SEQ ID NO: 34057 - DNA, 42 bp, Emericella nidulans
gttctcgagacgagcgatcgcgctcgtcccagtcgtccatcc

SEQ ID NO: 34058 - DNA, 42 bp, Emericella nidulans
gaattcactgcggccgccatgtcggagcgtgcgttccagaag

SEQ ID NO: 34059 - DNA, 42 bp, Emericella nidulans
gttctcgagacgagcgatcgcgggcaggacacggaggacgtt

SEQ ID NO: 34060 - DNA, 53 bp, Emericella nidulans
gaattcactgcggccgccatgaatctttcagtgggttgtatgtttcactttca

SEQ ID NO: 34061 - DNA, 45 bp, Emericella nidulans
gttctcgagacgagcgatcgctcacgtggatggcaaccggtttat

SEQ ID NO: 34062 - DNA, 43 bp, Emericella nidulans
gaattcactgcggccgccatgtggtcaacttgagcccgcgata

SEQ ID NO: 34063 - DNA, 43 bp, Emericella nidulans
gttctcgagacgagcgatcgccattgcaaagttggcccagaga

SEQ ID NO: 34064 - DNA, 41 bp, Emericella nidulans
gaattcactgcggccgccatgtgtgggatcaccggcatgaa

SEQ ID NO: 34065 - DNA, 43 bp, Emericella nidulans
gttctcgagacgagcgatcgcccaacaacacacctccagctca

SEQ ID NO: 34066 - DNA, 41 bp, Emericella nidulans
gaattcactgcggccgccatggaccttgcccgcaagaccca

SEQ ID NO: 34067 - DNA, 45 bp, Emericella nidulans
gttctcgagacgagcgatcgctcctggtcgtagagggtccgttca

SEQ ID NO: 34068 - DNA, 41 bp, Emericella nidulans
gaattcactgcggccgccatgttgatgcgcttgcgggtgtt

SEQ ID NO: 34069 - DNA, 41 bp, Emericella nidulans
gttctcgagacgagcgatcgctccagcggctcggtgtaggc

SEQ ID NO: 34070 - DNA, 44 bp, Emericella nidulans
gaattcactgcggccgccatgccccgaagacgtcagtcaaatgg

SEQ ID NO: 34071 - DNA, 47 bp, Emericella nidulans
gttctcgagacgagcgatcgctgcacaatcccttgcagactctgttc

SEQ ID NO: 34072 - DNA, 42 bp, Emericella nidulans
gaattcactgcggccgccatgtgcgctgttccttggggcttt

SEQ ID NO: 34073 - DNA, 41 bp, Emericella nidulans
gttctcgagacgagcgatcgctgctggtgtcgtcggaccgt

SEQ ID NO: 34074 - DNA, 41 bp, Emericella nidulans
gaattcactgcggccgccatgatgggaaaccggccagggtg

SEQ ID NO: 34075 - DNA, 55 bp, Emericella nidulans
gttctcgagacgagcgatcgcttcatctagatggtactgttgagttcgaataccc

SEQ ID NO: 34076 - DNA, 41 bp, Emericella nidulans
gaattcactgcggccgccatgggccgcggaagccctagact

SEQ ID NO: 34077 - DNA, 50 bp, Emericella nidulans
gttctcgagacgagcgatcgcttctacgttttcgagaagattggcgtagc

SEQ ID NO: 34078 - DNA, 57 bp, Emericella nidulans
gaattcactgcggccgccatgagaatcagaaggagattgaggagattatccgccaaa

SEQ ID NO: 34079 - DNA, 41 bp, Emericella nidulans
gttctcgagacgagcgatcgcagtctccgttcgcggcctcc

SEQ ID NO: 34080 - DNA, 56 bp, Emericella nidulans
gaattcactgcggccgccatggagaagatcaagactacgctcactgatctgctcca

SEQ ID NO: 34081 - DNA, 53 bp, Emericella nidulans
gttctcgagacgagcgatcgcgggaacatacagtgaagattatcgtgcggatg

SEQ ID NO: 34082 - DNA, 41 bp, Emericella nidulans
gaattcactgcggccgccatgcgaccgtgcgaacgtcaaca

SEQ ID NO: 34083 - DNA, 41 bp, Emericella nidulans
gttctcgagacgagcgatcgccgctgttgcgcaatcccatc

SEQ ID NO: 34084 - DNA, 46 bp, Emericella nidulans
gaattcactgcggccgccatgcccaccttctacccatgttcctcca

SEQ ID NO: 34085 - DNA, 41 bp, Emericella nidulans
gttctcgagacgagcgatcgcccagcggcagttgtcgcaaa

SEQ ID NO: 34086 - DNA, 41 bp, Emericella nidulans
gaattcactgcggccgccatgcccaacggctggggaactgg

SEQ ID NO: 34087 - DNA, 42 bp, Emericella nidulans
gttctcgagacgagcgatcgccctgcgcaatcttgccgacat

SEQ ID NO: 34088 - DNA, 41 bp, Emericella nidulans
gaattcactgcggccgccatgtccaccccagcggctacctg

SEQ ID NO: 34089 - DNA, 48 bp, Emericella nidulans
gttctcgagacgagcgatcgctgaacagagttccttaaagacccgaga

SEQ ID NO: 34090 - DNA, 41 bp, Emericella nidulans
gaattcactgcggccgccatgcccgacacccctctcccacc

SEQ ID NO: 34091 - DNA, 41 bp, Emericella nidulans
gttctcgagacgagcgatcgcgctgaacttcgcgcggctct

SEQ ID NO: 34092 - DNA, 41 bp, Emericella nidulans
gaattcactgcggccgccatgaccggcccaaccatgaccaa

SEQ ID NO: 34093 - DNA, 50 bp, Emericella nidulans
gttctcgagacgagcgatcgcaatctacagttttgacactgcgctgcttg

SEQ ID NO: 34094 - DNA, 43 bp, Emericella nidulans; identical to SEQ ID NO: 33950

SEQ ID NO: 34095 - DNA, 45 bp, Emericella nidulans
gttctcgagacgagcgatcgcactcttaactcgccccacccaagc

SEQ ID NO: 34096 - DNA, 42 bp, Emericella nidulans
gaattcactgcggccgccatgcgtcgtgttcttccgcgatca

SEQ ID NO: 34097 - DNA, 41 bp, Emericella nidulans
gttctcgagacgagcgatcgcccaacgcctctctgcggctc

SEQ ID NO: 34098 - DNA, 41 bp, Emericella nidulans
gaattcactgcggccgccatgcattggcggtggcaacatgg

SEQ ID NO: 34099 - DNA, 41 bp, Emericella nidulans
gttctcgagacgagcgatcgcgcgggaagtagccgccttca

SEQ ID NO: 34100 - DNA, 53 bp, Emericella nidulans
gaattcactgcggccgccatggctgaatgtcagcaatgaagatattgcgagga

SEQ ID NO: 34101 - DNA, 49 bp, Emericella nidulans
gttctcgagacgagcgatcgcgatgcagctccctaatcttacgaagacc

SEQ ID NO: 34102 - DNA, 43 bp, Emericella nidulans
gaattcactgcggccgccatgcggcacgttcaaaaagccactc

SEQ ID NO: 34103 - DNA, 41 bp, Emericella nidulans
gttctcgagacgagcgatcgcgcaggcgcagcccgtctact

SEQ ID NO: 34104 - DNA, 49 bp, Emericella nidulans
gaattcactgcggccgccatgtatgtggagctgaacgaggatatgatct

SEQ ID NO: 34105 - DNA, 47 bp, Emericella nidulans
gttctcgagacgagcgatcgccatctgctaaactgccaccaatcgaa

SEQ ID NO: 34106 - DNA, 41 bp, Emericella nidulans
gaattcactgcggccgccatgcgggcctgcatgacaccaaa

SEQ ID NO: 34107 - DNA, 41 bp, Emericella nidulans; identical to SEQ ID NO: 33985

SEQ ID NO: 34108 - DNA, 43 bp, Emericella nidulans
gaattcactgcggccgccatgggcctgcaagatcgaagacacg

SEQ ID NO: 34109 - DNA, 41 bp, Emericella nidulans
gttctcgagacgagcgatcgcgctgcgtcccggcctttttc

SEQ ID NO: 34110 - DNA, 49 bp, Emericella nidulans
gaattcactgcggccgccatgaaggccctctctagtaattggaagaagc

SEQ ID NO: 34111 - DNA, 43 bp, Emericella nidulans
gttctcgagacgagcgatcgccccgccgatacaaaagcatcgt

SEQ ID NO: 34112 - DNA, 44 bp, Emericella nidulans
gaattcactgcggccgccatgtcccaaatcaacaccgtcgagga

SEQ ID NO: 34113 - DNA, 48 bp, Emericella nidulans
gttctcgagacgagcgatcgctggccaaaattagagccaatctaaaaa

SEQ ID NO: 34114 - DNA, 54 bp, Emericella nidulans
gaattcactgcggccgccatgattgagtttacagtcttcgataaggttcgggtt

SEQ ID NO: 34115 - DNA, 42 bp, Emericella nidulans
gttctcgagacgagcgatcgcgacatcgtagccggcgtgctt

SEQ ID NO: 34116 - DNA, 46 bp, Emericella nidulans
gaattcactgcggccgccatgtgccaaccttgttactgaccttctg

SEQ ID NO: 34117 - DNA, 44 bp, Emericella nidulans
gttctcgagacgagcgatcgcgaggccgagatggcaaaagaaga

SEQ ID NO: 34118 - DNA, 42 bp, Emericella nidulans
gaattcactgcggccgccatgtggatgccacggtgtgattga

SEQ ID NO: 34119 - DNA, 56 bp, Emericella nidulans
gttctcgagacgagcgatcgcgtgtatctaaaccagtgctctaaaagcattcacca

SEQ ID NO: 34120 - DNA, 53 bp, Emericella nidulans
gaattcactgcggccgccatgttcaagatcctcagatgacaggatatgtttcg

SEQ ID NO: 34121 - DNA, 47 bp, Emericella nidulans
gttctcgagacgagcgatcgccacgcgattcattagggctttattgg

SEQ ID NO: 34122 - DNA, 41 bp, Emericella nidulans
gaattcactgcggccgccatgagcccctgtcgcggatgatg

SEQ ID NO: 34123 - DNA, 50 bp, Emericella nidulans
gttctcgagacgagcgatcgcttcgatatccagatatacccgttcactcc

SEQ ID NO: 34124 - DNA, 41 bp, Emericella nidulans
gaattcactgcggccgccatgcgctgaggtgacgcggttcc

SEQ ID NO: 34125 - DNA, 41 bp, Emericella nidulans
gttctcgagacgagcgatcgccatccgttccccacccccac

SEQ ID NO: 34126 - DNA, 41 bp, Emericella nidulans
gaattcactgcggccgccatgcctcgctgatccggcacgta

SEQ ID NO: 34127 - DNA, 44 bp, Emericella nidulans
gttctcgagacgagcgatcgccggcaaacaccgagtcattcgtc

SEQ ID NO: 34128 - DNA, 41 bp, Emericella nidulans
gaattcactgcggccgccatgtgctctccgggcgaaattgg

SEQ ID NO: 34129 - DNA, 41 bp, Emericella nidulans
gttctcgagacgagcgatcgccaccggcgggcatgtacaga

SEQ ID NO: 34130 - DNA, 41 bp, Emericella nidulans
gaattcactgcggccgccatgagcgacaacggcatcggctc

SEQ ID NO: 34131 - DNA, 44 bp, Emericella nidulans
gttctcgagacgagcgatcgccatgatgtgatcctgcccacgaa

SEQ ID NO: 34132 - DNA, 41 bp, Emericella nidulans
gaattcactgcggccgccatgccgcaccaccgtccacgttt

SEQ ID NO: 34133 - DNA, 41 bp, Emericella nidulans
gttctcgagacgagcgatcgcggggcaggggcagggttaga

SEQ ID NO: 34134 - DNA, 41 bp, Emericella nidulans
gaattcactgcggccgccatgatcgtgaccggcgcatcctc

SEQ ID NO: 34135 - DNA, 41 bp, Emericella nidulans
gttctcgagacgagcgatcgcatcccggccccttcagtgga

SEQ ID NO: 34136 - DNA, 41 bp, Emericella nidulans
gaattcactgcggccgccatgggcagggcccgtgtcaacaa

SEQ ID NO: 34137 - DNA, 43 bp, Emericella nidulans
gttctcgagacgagcgatcgctgcccaaagcaaggaggatgga

SEQ ID NO: 34138 - DNA, 41 bp, Emericella nidulans
gaattcactgcggccgccatgcagctgtcgctccccagggt

SEQ ID NO: 34139 - DNA, 41 bp, Emericella nidulans
gttctcgagacgagcgatcgcccacgcctgcttcccttcca

SEQ ID NO: 34140 - DNA, 41 bp, Emericella nidulans
gaattcactgcggccgccatgtgcccccttcttcgctgagg

SEQ ID NO: 34141 - DNA, 50 bp, Emericella nidulans
gttctcgagacgagcgatcgcagcgaagtagctcttccaaagaacacctg

SEQ ID NO: 34142 - DNA, 49 bp, Emericella nidulans
gaattcactgcggccgccatgctggcgataccgctatacatacacttga

SEQ ID NO: 34143 - DNA, 43 bp, Emericella nidulans
gttctcgagacgagcgatcgccagcgggatcgataatgctcgt

SEQ ID NO: 34144 - DNA, 51 bp, Emericella nidulans
gaattcactgcggccgccatggggtgtgagtcaatcatcagtaagcttgaa

SEQ ID NO: 34145 - DNA, 45 bp, Emericella nidulans
gttctcgagacgagcgatcgccgcttctcggtttgttcgttcaga

SEQ ID NO: 34146 - DNA, 42 bp, Emericella nidulans
gaattcactgcggccgccatgcgccaccattggaccacctca

SEQ ID NO: 34147 - DNA, 41 bp, Emericella nidulans
gttctcgagacgagcgatcgcggctccgctgctttcctcca

SEQ ID NO: 34148 - DNA, 41 bp, Emericella nidulans
gaattcactgcggccgccatgcgtgcacggcgaagtctccc

SEQ ID NO: 34149 - DNA, 42 bp, Emericella nidulans
gttctcgagacgagcgatcgccgcactctcccgcttcgcttt

SEQ ID NO: 34150 - DNA, 41 bp, Emericella nidulans
gaattcactgcggccgccatggcccgcaagcagctgtccac

SEQ ID NO: 34151 - DNA, 41 bp, Emericella nidulans
gttctcgagacgagcgatcgcaggttcagaggggcgggtcc

SEQ ID NO: 34152 - DNA, 43 bp, Emericella nidulans
gaattcactgcggccgccatgcccagccacgaaatcctggtca

SEQ ID NO: 34153 - DNA, 55 bp, Emericella nidulans
gttctcgagacgagcgatcgcctcatattcaaacctattcccactagatcgcctc

SEQ ID NO: 34154 - DNA, 42 bp, Emericella nidulans; identical to SEQ ID NO: 34044

SEQ ID NO: 34155 - DNA, 41 bp, Emericella nidulans
gttctcgagacgagcgatcgctgccggcagccagtcatcat

SEQ ID NO: 34156 - DNA, 41 bp, Emericella nidulans
gaattcactgcggccgccatgcccaatggcacgccttcctg

SEQ ID NO: 34157 - DNA, 44 bp, Emericella nidulans
gttctcgagacgagcgatcgcgctgaacctcactccagcgtcca

SEQ ID NO: 34158 - DNA, 46 bp, Emericella nidulans
gaattcactgcggccgccatgtcaagcatttgtccttgctgtgagc

SEQ ID NO: 34159 - DNA, 45 bp, Emericella nidulans
gttctcgagacgagcgatcgctgcagctgacaactccgaggacag

SEQ ID NO: 34160 - DNA, 40 bp, Emericella nidulans
gaattcactgcggccgccatgtggcggcagggcaggaata

SEQ ID NO: 34161 - DNA, 48 bp, Emericella nidulans
gttctcgagacgagcgatcgcgcacccacatgaagatgaactgaatga

SEQ ID NO: 34162 - DNA, 49 bp, Emericella nidulans
gaattcactgcggccgccatgctagacaactcagccggaatggtaacac

SEQ ID NO: 34163 - DNA, 41 bp, Emericella nidulans
gttctcgagacgagcgatcgcgggtcgggactgagcgacca

SEQ ID NO: 34164 - DNA, 41 bp, Emericella nidulans
gaattcactgcggccgccatgtctcgccagcgtgcacaacc

SEQ ID NO: 34165 - DNA, 45 bp, Emericella nidulans
gttctcgagacgagcgatcgcggccctagcacctgtttccgagtc

SEQ ID NO: 34166 - DNA, 44 bp, Emericella nidulans
gaattcactgcggccgccatgtccagacgccttcacacgctttc

SEQ ID NO: 34167 - DNA, 41 bp, Emericella nidulans
gttctcgagacgagcgatcgccgagctgatcgtcgcgttgg

SEQ ID NO: 34168 - DNA, 53 bp, Emericella nidulans
gaattcactgcggccgccatggtatcaagcagggaaagaaatatgacgatcca

SEQ ID NO: 34169 - DNA, 41 bp, Emericella nidulans
gttctcgagacgagcgatcgccctcgggcttcttgggcaga

SEQ ID NO: 34170 - DNA, 43 bp, Emericella nidulans
gaattcactgcggccgccatggggtcccgtactgaccataccc

SEQ ID NO: 34171 - DNA, 41 bp, Emericella nidulans
gttctcgagacgagcgatcgccggattgggaacgcatcacg

SEQ ID NO: 34172 - DNA, 41 bp, Emericella nidulans
gaattcactgcggccgccatgggccgtggcttcgttggaga

SEQ ID NO: 34173 - DNA, 41 bp, Emericella nidulans
gttctcgagacgagcgatcgcgggagagcttgcgcagtggg

SEQ ID NO: 34174 - DNA, 41 bp, Emericella nidulans
gaattcactgcggccgccatgcagcgcaagcgcaacagtga

SEQ ID NO: 34175 - DNA, 48 bp, Emericella nidulans
gttctcgagacgagcgatcgctccccttcacaccaaacaagtaagctg

SEQ ID NO: 34176 - DNA, 47 bp, Emericella nidulans
gaattcactgcggccgccatggcagaacaaagtcttcgcgaacatgc

SEQ ID NO: 34177 - DNA, 49 bp, Emericella nidulans
gttctcgagacgagcgatcgcagacgacagtatcctcttaaccaccaga

SEQ ID NO: 34178 - DNA, 41 bp, Emericella nidulans
gaattcactgcggccgccatgccgagatggcgatcctgggt

SEQ ID NO: 34179 - DNA, 41 bp, Emericella nidulans
gttctcgagacgagcgatcgccggaccgcgttggcgttgta

SEQ ID NO: 34180 - DNA, 46 bp, Emericella nidulans
gaattcactgcggccgccatgagttctggtttggccccttctaact

SEQ ID NO: 34181 - DNA, 42 bp, Emericella nidulans
gttctcgagacgagcgatcgccccaatcgcctcaaccgtcgt

SEQ ID NO: 34182 - DNA, 52 bp, Emericella nidulans
gaattcactgcggccgccatgttcttcttcaacatgagctttattctcaccc

SEQ ID NO: 34183 - DNA, 45 bp, Emericella nidulans
gttctcgagacgagcgatcgccgaccgttttgtgtccgttcaaca

SEQ ID NO: 34184 - DNA, 44 bp, Emericella nidulans
gaattcactgcggccgccatgccccagtcttttctgggatctgg

SEQ ID NO: 34185 - DNA, 45 bp, Emericella nidulans
gttctcgagacgagcgatcgcgggaacggagtcagtcagggtctg

SEQ ID NO: 34186 - DNA, 41 bp, Emericella nidulans
gaattcactgcggccgccatgcccgtcccatccagctccaa

SEQ ID NO: 34187 - DNA, 50 bp, Emericella nidulans
gttctcgagacgagcgatcgcgacgaattcaaagttatatctcgacagca

SEQ ID NO: 34188 - DNA, 54 bp, Emericella nidulans
gaattcactgcggccgccatgtgagtatctccatctgatgggtttcatctatcg

SEQ ID NO: 34189 - DNA, 42 bp, Emericella nidulans
gttctcgagacgagcgatcgccgccgtcgtggtgaagagtga

SEQ ID NO: 34190 - DNA, 40 bp, Emericella nidulans
gaattcactgcggccgccatgatcgccgacgtggtgaccc

SEQ ID NO: 34191 - DNA, 42 bp, Emericella nidulans
gttctcgagacgagcgatcgccgttgacggcctggacgtagg

SEQ ID NO: 34192 - DNA, 44 bp, Emericella nidulans
gaattcactgcggccgccatgcccccaacaaatcacaaccaaca

SEQ ID NO: 34193 - DNA, 50 bp, Emericella nidulans
gttctcgagacgagcgatcgcagggagatatagggtgagggaaagaaacg

SEQ ID NO: 34194 - DNA, 46 bp, Emericella nidulans
gaattcactgcggccgccatgtggacaaagctctacagagcggaga

SEQ ID NO: 34195 - DNA, 42 bp, Emericella nidulans
gttctcgagacgagcgatcgccggcctatctcgacggcagac

SEQ ID NO: 34196 - DNA, 53 bp, Emericella nidulans
gaattcactgcggccgccatgatgtcgttaattaaatgtctaggctgccgttg

SEQ ID NO: 34197 - DNA, 41 bp, Emericella nidulans
gttctcgagacgagcgatcgcttggcccatgttcccaggtg

SEQ ID NO: 34198 - DNA, 42 bp, Emericella nidulans
gaattcactgcggccgccatgtccgtatcctccgccgtctca

SEQ ID NO: 34199 - DNA, 41 bp, Emericella nidulans
gttctcgagacgagcgatcgcctctctccgccaccgccgta

SEQ ID NO: 34200 - DNA, 49 bp, Emericella nidulans
gaattcactgcggccgccatggcccgaaaggttatctctgtcgacaact

SEQ ID NO: 34201 - DNA, 41 bp, Emericella nidulans
gttctcgagacgagcgatcgcttcccctttcgccgactccc

SEQ ID NO: 34202 - DNA, 49 bp, Emericella nidulans
gaattcactgcggccgccatgtgtgcattgtgctacgaagctaatcaag

SEQ ID NO: 34203 - DNA, 44 bp, Emericella nidulans
gttctcgagacgagcgatcgcctgcgatcgtcgacccattaaca

SEQ ID NO: 34204 - DNA, 46 bp, Emericella nidulans
gaattcactgcggccgccatgccgtcgacgtagacagcttttgggt

SEQ ID NO: 34205 - DNA, 49 bp, Emericella nidulans
gttctcgagacgagcgatcgccaacttctcaagcgacttaatttttcca

SEQ ID NO: 34206 - DNA, 45 bp, Emericella nidulans
gaattcactgcggccgccatgcgttggatgacttctctgcgggtt

SEQ ID NO: 34207 - DNA, 41 bp, Emericella nidulans
gttctcgagacgagcgatcgctagcgccaggccgtctctcg

SEQ ID NO: 34208 - DNA, 44 bp, Emericella nidulans
gaattcactgcggccgccatgggcgggtattttccggacgatct

SEQ ID NO: 34209 - DNA, 41 bp, Emericella nidulans
gttctcgagacgagcgatcgccaccggctagctcgcgcaat

SEQ ID NO: 34210 - DNA, 41 bp, Emericella nidulans
gaattcactgcggccgccatgagcggcagaaatcgcgacca

SEQ ID NO: 34211 - DNA, 49 bp, Emericella nidulans
gttctcgagacgagcgatcgccaacggcgttgttcataccagtatgttg

SEQ ID NO: 34212 - DNA, 46 bp, Emericella nidulans
gaattcactgcggccgccatgaagttacccgaggctacgcaactga

SEQ ID NO: 34213 - DNA, 43 bp, Emericella nidulans
gttctcgagacgagcgatcgcgggagacttgcgtgccttgaca

SEQ ID NO: 34214 - DNA, 49 bp, Emericella nidulans
gaattcactgcggccgccatgcaccctaaactgctctttcagagcccta

SEQ ID NO: 34215 - DNA, 57 bp, Emericella nidulans
gttctcgagacgagcgatcgctaaatattcttatcaaaatgaattacagcggggtat

SEQ ID NO: 34216 - DNA, 44 bp, Emericella nidulans
gaattcactgcggccgccatgtgggatcggcgatgatcttcttg

SEQ ID NO: 34217 - DNA, 41 bp, Emericella nidulans
gttctcgagacgagcgatcgctgccagacaatggcgcacaa

SEQ ID NO: 34218 - DNA, 50 bp, Emericella nidulans
gaattcactgcggccgccatgaccataccaccaacgtttctcattaaaca

SEQ ID NO: 34219 - DNA, 41 bp, Emericella nidulans
gttctcgagacgagcgatcgcccgcctgggtagcttggctc

SEQ ID NO: 34220 - DNA, 51 bp, Emericella nidulans
gaattcactgcggccgccatgctctcctaatctcgtcgattctcatcttca

SEQ ID NO: 34221 - DNA, 43 bp, Emericella nidulans
gttctcgagacgagcgatcgctgcagccagttatccaagtcca

SEQ ID NO: 34222 - DNA, 41 bp, Emericella nidulans
gaattcactgcggccgccatgccaattggtcgcggtcaaca

SEQ ID NO: 34223 - DNA, 45 bp, Emericella nidulans
gttctcgagacgagcgatcgcaaggatgaatgggggcactacctc

SEQ ID NO: 34224 - DNA, 41 bp, Emericella nidulans
gaattcactgcggccgccatggtgggaaccccgcgtctcct

SEQ ID NO: 34225 - DNA, 51 bp, Emericella nidulans
gttctcgagacgagcgatcgcgcaggaggtttgttcttgctcttaaactca

SEQ ID NO: 34226 - DNA, 45 bp, Emericella nidulans
gaattcactgcggccgccatgtgtcatcacggaagaaggtcatgc

SEQ ID NO: 34227 - DNA, 41 bp, Emericella nidulans
gttctcgagacgagcgatcgccaaccgtcgcgctcggtagt

SEQ ID NO: 34228 - DNA, 42 bp, Emericella nidulans
gaattcactgcggccgccatggcagtgtctgcgattgggcac

SEQ ID NO: 34229 - DNA, 41 bp, Emericella nidulans
gttctcgagacgagcgatcgccgccagccaacatggagcaa

SEQ ID NO: 34230 - DNA, 47 bp, Emericella nidulans
gaattcactgcggccgccatggcgtggtactgttccggatcaacaaa

SEQ ID NO: 34231 - DNA, 45 bp, Emericella nidulans; identical to SEQ ID NO: 29229

SEQ ID NO: 34232 - DNA, 44 bp, Emericella nidulans
gaattcactgcggccgccatgccatcttctcggaccagggtcgt

SEQ ID NO: 34233 - DNA, 41 bp, Emericella nidulans
gttctcgagacgagcgatcgccctccgtcagtgcccggaaa

SEQ ID NO: 34234 - DNA, 41 bp, Emericella nidulans
gaattcactgcggccgccatgacccagagcgccaaggcaac

SEQ ID NO: 34235 - DNA, 46 bp, Emericella nidulans
gttctcgagacgagcgatcgctcaccttcggcctcaagattgactg

SEQ ID NO: 34236 - DNA, 41 bp, Emericella nidulans
gaattcactgcggccgccatgcgcggctcttcccactcagc

SEQ ID NO: 34237 - DNA, 45 bp, Emericella nidulans
gttctcgagacgagcgatcgctgcagtgcagctctccaccttcat

SEQ ID NO: 34238 - DNA, 41 bp, Emericella nidulans
gaattcactgcggccgccatgtcccttccgccggaacttca

SEQ ID NO: 34239 - DNA, 41 bp, Emericella nidulans
gttctcgagacgagcgatcgctggttcgcccgactcgcttt

SEQ ID NO: 34240 - DNA, 47 bp, Emericella nidulans
gaattcactgcggccgccatggcggcggatatagttgactctcacga

SEQ ID NO: 34241 - DNA, 44 bp, Emericella nidulans
gttctcgagacgagcgatcgcccaagaggacgttcatcacgttg

SEQ ID NO: 34242 - DNA, 50 bp, Emericella nidulans
gaattcactgcggccgccatgatgacgagccttaagagccttttcttatc

SEQ ID NO: 34243 - DNA, 43 bp, Emericella nidulans
gttctcgagacgagcgatcgctccatctccaattcgccgctct

SEQ ID NO: 34244 - DNA, 45 bp, Emericella nidulans
gaattcactgcggccgccatgtcgcgtctcttggtttgctcaaca

SEQ ID NO: 34245 - DNA, 52 bp, Emericella nidulans
gttctcgagacgagcgatcgcgacatattgagatagccaccttataccttcg

SEQ ID NO: 34246 - DNA, 41 bp, Emericella nidulans
gaattcactgcggccgccatgggtgagcgtgtgcccctgat

SEQ ID NO: 34247 - DNA, 47 bp, Emericella nidulans
gttctcgagacgagcgatcgccgggcagagagaatttcttgcctttc

SEQ ID NO: 34248 - DNA, 41 bp, Emericella nidulans
gaattcactgcggccgccatggcgcaccatggcaaacaaga

SEQ ID NO: 34249 - DNA, 53 bp, Emericella nidulans
gttctcgagacgagcgatcgctcaaatatcggaagctctcaatctctaagtcc

SEQ ID NO: 34250 - DNA, 41 bp, Emericella nidulans
gaattcactgcggccgccatggctgcgcaggaccacacgac

SEQ ID NO: 34251 - DNA, 41 bp, Emericella nidulans
gttctcgagacgagcgatcgcgctccagccatccgccacaa

SEQ ID NO: 34252 - DNA, 46 bp, Emericella nidulans
gaattcactgcggccgccatgcccaacaacatcaacattcgtcgtg

SEQ ID NO: 34253 - DNA, 41 bp, Emericella nidulans
gttctcgagacgagcgatcgcccgagctccttggccttcaa

SEQ ID NO: 34254 - DNA, 41 bp, Emericella nidulans
gaattcactgcggccgccatgtggctgagatccgccgcaag

SEQ ID NO: 34255 - DNA, 49 bp, Emericella nidulans
gttctcgagacgagcgatcgcggcgaggggaatagactaatttacagga

SEQ ID NO: 34256 - DNA, 41 bp, Emericella nidulans
gaattcactgcggccgccatgaccatgggtcccggaggagg

SEQ ID NO: 34257 - DNA, 41 bp, Emericella nidulans
gttctcgagacgagcgatcgccacgccgaggctcgaccttt

SEQ ID NO: 34258 - DNA, 43 bp, Emericella nidulans
gaattcactgcggccgccatgcaccccgctcaatccttgttgg

SEQ ID NO: 34259 - DNA, 41 bp, Emericella nidulans
gttctcgagacgagcgatcgcccctccctcgccctttcaca

SEQ ID NO: 34260 - DNA, 45 bp, Emericella nidulans
gaattcactgcggccgccatggagcaacaagtgctgggagattcg

SEQ ID NO: 34261 - DNA, 48 bp, Emericella nidulans
gttctcgagacgagcgatcgcatctcctctactgtccgtcatttgctt

SEQ ID NO: 34262 - DNA, 42 bp, Emericella nidulans
gaattcactgcggccgccatgtgaacccgagctaccggggtg

SEQ ID NO: 34263 - DNA, 41 bp, Emericella nidulans
gttctcgagacgagcgatcgccgccgtcaggaacccaacag

SEQ ID NO: 34264 - DNA, 41 bp, Emericella nidulans
gaattcactgcggccgccatgccgcatctttgtccgcgtca

SEQ ID NO: 34265 - DNA, 52 bp, Emericella nidulans
gttctcgagacgagcgatcgcacgacctcataataggaattgcagaatttca

SEQ ID NO: 34266 - DNA, 47 bp, Emericella nidulans
gaattcactgcggccgccatggccgccagctctctagagaacctcaa

SEQ ID NO: 34267 - DNA, 41 bp, Emericella nidulans
gttctcgagacgagcgatcgccgggcatcaagcctcgcttc

SEQ ID NO: 34268 - DNA, 42 bp, Emericella nidulans
gaattcactgcggccgccatgtgggtttggcgttggaggtga

SEQ ID NO: 34269 - DNA, 41 bp, Emericella nidulans
gttctcgagacgagcgatcgccgcactgtcgccacccctct

SEQ ID NO: 34270 - DNA, 49 bp, Emericella nidulans
gaattcactgcggccgccatgtcaataggtaccttgtttgtcaggtccc

SEQ ID NO: 34271 - DNA, 44 bp, Emericella nidulans
gttctcgagacgagcgatcgcgctgccacccaggcgatattgat

SEQ ID NO: 34272 - DNA, 41 bp, Emericella nidulans
gaattcactgcggccgccatggggcggatgtggtcgacgtt

SEQ ID NO: 34273 - DNA, 41 bp, Emericella nidulans
gttctcgagacgagcgatcgccccaagcccaagcgagtgga

SEQ ID NO: 34274 - DNA, 49 bp, Emericella nidulans
gaattcactgcggccgccatgacccaatatcatctcgttgaaaacgaac

SEQ ID NO: 34275 - DNA, 42 bp, Emericella nidulans
gttctcgagacgagcgatcgcccccaggtctcgcgtctgaca

SEQ ID NO: 34276 - DNA, 44 bp, Emericella nidulans
gaattcactgcggccgccatgccgtttccctctccctcttcctg

SEQ ID NO: 34277 - DNA, 46 bp, Emericella nidulans
gttctcgagacgagcgatcgccccatcctagagagcggaaatggtg

SEQ ID NO: 34278 - DNA, 42 bp, Emericella nidulans
gaattcactgcggccgccatgggacggtaagccaaccccaca

SEQ ID NO: 34279 - DNA, 51 bp, Emericella nidulans
gttctcgagacgagcgatcgcattggcagattgaacatacagagtacatcg

SEQ ID NO: 34280 - DNA, 41 bp, Emericella nidulans
gaattcactgcggccgccatgctggcaccgccgtcgtcact

SEQ ID NO: 34281 - DNA, 43 bp, Emericella nidulans
gttctcgagacgagcgatcgccaagcgcatgcccctgtacaaa

SEQ ID NO: 34282 - DNA, 46 bp, Emericella nidulans
gaattcactgcggccgccatgtggacgaacccgaagaagtatgaca

SEQ ID NO: 34283 - DNA, 43 bp, Emericella nidulans
gttctcgagacgagcgatcgctgccagttccttttgggcatcc

SEQ ID NO: 34284 - DNA, 41 bp, Emericella nidulans
gaattcactgcggccgccatgggaggacatggcacgcacga

SEQ ID NO: 34285 - DNA, 43 bp, Emericella nidulans
gttctcgagacgagcgatcgctccaacccgatagctcgcatga

SEQ ID NO: 34286 - DNA, 42 bp, Emericella nidulans
gaattcactgcggccgccatgtgctggcgagatccctgtcaa

SEQ ID NO: 34287 - DNA, 45 bp, Emericella nidulans
gttctcgagacgagcgatcgctggttgcatcatcgtaggagaccc

SEQ ID NO: 34288 - DNA, 41 bp, Emericella nidulans
gaattcactgcggccgccatggtaggcggcgatcgcgtggg

SEQ ID NO: 34289 - DNA, 41 bp, Emericella nidulans
gttctcgagacgagcgatcgcaacgccaacgtttccggtgc

SEQ ID NO: 34290 - DNA, 41 bp, Emericella nidulans
gaattcactgcggccgccatggtctcgcgtgccggctcagt

SEQ ID NO: 34291 - DNA, 41 bp, Emericella nidulans
gttctcgagacgagcgatcgcgggtgaccgggttggtctga

SEQ ID NO: 34292 - DNA, 41 bp, Emericella nidulans
gaattcactgcggccgccatgggcgcgcgatgaccgtattc

SEQ ID NO: 34293 - DNA, 41 bp, Emericella nidulans
gttctcgagacgagcgatcgccaccgctcattgccgctcat

SEQ ID NO: 34294 - DNA, 46 bp, Emericella nidulans
gaattcactgcggccgccatggctcattttgaggctgcaactatgc

SEQ ID NO: 34295 - DNA, 48 bp, Emericella nidulans
gttctcgagacgagcgatcgcgcctgatctcctatcaccttccccttc

SEQ ID NO: 34296 - DNA, 41 bp, Emericella nidulans
gaattcactgcggccgccatgcaccttctcgccccgcaaaa

SEQ ID NO: 34297 - DNA, 43 bp, Emericella nidulans
gttctcgagacgagcgatcgccgcactgaagccctgcatcttg

SEQ ID NO: 34298 - DNA, 43 bp, Emericella nidulans
gaattcactgcggccgccatgcgcttcgttgggctcgctaatg

SEQ ID NO: 34299 - DNA, 41 bp, Emericella nidulans
gttctcgagacgagcgatcgcggatctcgcaggggtcagca

SEQ ID NO: 34300 - DNA, 45 bp, Emericella nidulans
gaattcactgcggccgccatgctcgctgtcatcatggccaaaaca

SEQ ID NO: 34301 - DNA, 41 bp, Emericella nidulans
gttctcgagacgagcgatcgctgccagcacgggaaagctca

SEQ ID NO: 34302 - DNA, 50 bp, Emericella nidulans
gaattcactgcggccgccatgacagaagatattttaacccaggagtcacg

SEQ ID NO: 34303 - DNA, 55 bp, Emericella nidulans
gttctcgagacgagcgatcgcaagcttgtaaaaccgagcagccaggccactaata

SEQ ID NO: 34304 - DNA, 41 bp, Emericella nidulans
gaattcactgcggccgccatgacgcgcagaagagccggttg

SEQ ID NO: 34305 - DNA, 41 bp, Emericella nidulans
gttctcgagacgagcgatcgctccgcggacatcggtcagtg

SEQ ID NO: 34306 - DNA, 41 bp, Emericella nidulans
gaattcactgcggccgccatgtttcccgcggttttcttgga

SEQ ID NO: 34307 - DNA, 41 bp, Emericella nidulans
gttctcgagacgagcgatcgcccttccgcggcctgttgttc

SEQ ID NO: 34308 - DNA, 49 bp, Emericella nidulans
gaattcactgcggccgccatgcaaaaggtcctttgagaacgctcttgtt

SEQ ID NO: 34309 - DNA, 41 bp, Emericella nidulans
gttctcgagacgagcgatcgccatggcaccgtgcgaagcat

SEQ ID NO: 34310 - DNA, 43 bp, Emericella nidulans
gaattcactgcggccgccatgcagcaaactcaaggaggcgtgt

SEQ ID NO: 34311 - DNA, 45 bp, Emericella nidulans
gttctcgagacgagcgatcgcgacgctcgatgtaatccttctcca

SEQ ID NO: 34312 - DNA, 45 bp, Emericella nidulans
gaattcactgcggccgccatggccgtaatctgggtcgacaacgtc

SEQ ID NO: 34313 - DNA, 57 bp, Emericella nidulans
gttctcgagacgagcgatcgctatcattgttgatcctgcttaaccatgtacactacc

SEQ ID NO: 34314 - DNA, 43 bp, Emericella nidulans
gaattcactgcggccgccatgccgtcactttcacagcggacca

SEQ ID NO: 34315 - DNA, 41 bp, Emericella nidulans; identical to SEQ ID NO: 33837

SEQ ID NO: 34316 - DNA, 41 bp, Emericella nidulans
gaattcactgcggccgccatgtgacatcgcccaagcgcatc

SEQ ID NO: 34317 - DNA, 49 bp, Emericella nidulans
gttctcgagacgagcgatcgcgagagcctgtacaacacttgtaccttcg

SEQ ID NO: 34318 - DNA, 45 bp, Emericella nidulans
gaattcactgcggccgccatgtctttaaaagctccacgcgcaatg

SEQ ID NO: 34319 - DNA, 45 bp, Emericella nidulans
gttctcgagacgagcgatcgccccagcccttgtaccaatcactcc

SEQ ID NO: 34320 - DNA, 57 bp, Emericella nidulans
gaattcactgcggccgccatgcttctactatctagacttatcccacactgaccgact

SEQ ID NO: 34321 - DNA, 43 bp, Emericella nidulans
gttctcgagacgagcgatcgctgcatgtatgtcgccgtcgagt

SEQ ID NO: 34322 - DNA, 41 bp, Emericella nidulans
gaattcactgcggccgccatgccaccccgcatgacggctac

SEQ ID NO: 34323 - DNA, 41 bp, Emericella nidulans
gttctcgagacgagcgatcgcatccctgcccccaccccttc

SEQ ID NO: 34324 - DNA, 56 bp, Emericella nidulans
gaattcactgcggccgccatgcctaacttgctgctgtgtagatatttactctattg

SEQ ID NO: 34325 - DNA, 45 bp, Emericella nidulans
gttctcgagacgagcgatcgcgcagagaccagcgtagacggtagc

SEQ ID NO: 34326 - DNA, 42 bp, Emericella nidulans
gaattcactgcggccgccatgccgctggagtcgggtcgctta

SEQ ID NO: 34327 - DNA, 42 bp, Emericella nidulans
gttctcgagacgagcgatcgcggccgggatagacctcggaga

SEQ ID NO: 34328 - DNA, 49 bp, Emericella nidulans
gaattcactgcggccgccatgttgcgaaattcaattcgctaacgggttc

SEQ ID NO: 34329 - DNA, 41 bp, Emericella nidulans
gttctcgagacgagcgatcgccgatctggccaaaggcagga

SEQ ID NO: 34330 - DNA, 56 bp, Emericella nidulans
gaattcactgcggccgccatgatccgtccgtgtcactattcttaggtaaggaactc

SEQ ID NO: 34331 - DNA, 41 bp, Emericella nidulans
gttctcgagacgagcgatcgcggtgctgcgggagggtcgta

SEQ ID NO: 34332 - DNA, 41 bp, Emericella nidulans
gaattcactgcggccgccatgggccgggactctgtcgcagt

SEQ ID NO: 34333 - DNA, 41 bp, Emericella nidulans
gttctcgagacgagcgatcgccgcaccgatctcgggcttgt

SEQ ID NO: 34334 - DNA, 52 bp, Emericella nidulans
gaattcactgcggccgccatgctcctttcacaatatttttcaaagttggatt

SEQ ID NO: 34335 - DNA, 41 bp, Emericella nidulans
gttctcgagacgagcgatcgccaccccatccacgacgtgcc

SEQ ID NO: 34336 - DNA, 50 bp, Emericella nidulans
gaattcactgcggccgccatgtatgcggcttatagacaggaactgttagc

SEQ ID NO: 34337 - DNA, 51 bp, Emericella nidulans
gttctcgagacgagcgatcgccgtacctctgtagagtaaagaatgccctga

SEQ ID NO: 34338 - DNA, 53 bp, Emericella nidulans
gaattcactgcggccgccatgtaagaatctcacgagttatattcgccctttgg

SEQ ID NO: 34339 - DNA, 41 bp, Emericella nidulans
gttctcgagacgagcgatcgccgcatcgggccgatactgct

SEQ ID NO: 34340 - DNA, 41 bp, Emericella nidulans
gaattcactgcggccgccatgtcccgcgcctcctcaaattc

SEQ ID NO: 34341 - DNA, 41 bp, Emericella nidulans
gttctcgagacgagcgatcgcgcacccaagcctcccgaaca

SEQ ID NO: 34342 - DNA, 41 bp, Emericella nidulans
gaattcactgcggccgccatgatggcaaagcgccttgaggg

SEQ ID NO: 34343 - DNA, 42 bp, Emericella nidulans
gttctcgagacgagcgatcgccctggtggctggggaagatca

SEQ ID NO: 34344 - DNA, 41 bp, Emericella nidulans
gaattcactgcggccgccatgtcgaatcgcacgtcccgttg

SEQ ID NO: 34345 - DNA, 41 bp, Emericella nidulans
gttctcgagacgagcgatcgcgaccgccgccgaagggtaaa

SEQ ID NO: 34346 - DNA, 42 bp, Emericella nidulans
gaattcactgcggccgccatgtgcgtggatgcgagagctcaa

SEQ ID NO: 34347 - DNA, 43 bp, Emericella nidulans
gttctcgagacgagcgatcgcgcaaggtcccaatcaccatcca

SEQ ID NO: 34348 - DNA, 45 bp, Emericella nidulans
gaattcactgcggccgccatggacaagttcgatatgcgcttgatg

SEQ ID NO: 34349 - DNA, 41 bp, Emericella nidulans
gttctcgagacgagcgatcgcccgggagggctagcgggaac

SEQ ID NO: 34350 - DNA, 41 bp, Emericella nidulans
gaattcactgcggccgccatggccgagcgctcgcatagtcg

SEQ ID NO: 34351 - DNA, 54 bp, Emericella nidulans
gttctcgagacgagcgatcgcacagtatgggaaagatgagaataacccaaaagg

SEQ ID NO: 34352 - DNA, 42 bp, Emericella nidulans
gaattcactgcggccgccatggcgcttgtcgaagggcaagaa

SEQ ID NO: 34353 - DNA, 49 bp, Emericella nidulans
gttctcgagacgagcgatcgcaacactctccaaaacctgctctttgaac

SEQ ID NO: 34354 - DNA, 41 bp, Emericella nidulans
gaattcactgcggccgccatgtcgcgagacgtcgctactgg

SEQ ID NO: 34355 - DNA, 41 bp, Emericella nidulans
gttctcgagacgagcgatcgcgcccgctccacaacctctcg

SEQ ID NO: 34356 - DNA, 41 bp, Emericella nidulans
gaattcactgcggccgccatgggaccgctccttgggcctgt

SEQ ID NO: 34357 - DNA, 49 bp, Emericella nidulans
gttctcgagacgagcgatcgctgcctagccagaagcatatctagaaaca

SEQ ID NO: 34358 - DNA, 41 bp, Emericella nidulans
gaattcactgcggccgccatgtgactttggccgcacgtggt

SEQ ID NO: 34359 - DNA, 49 bp, Emericella nidulans
gttctcgagacgagcgatcgcttcaagcttacattgcgagtaaaagtgg

SEQ ID NO: 34360 - DNA, 41 bp, Emericella nidulans
gaattcactgcggccgccatgagctttcaggcgcggtcacg

SEQ ID NO: 34361 - DNA, 46 bp, Emericella nidulans
gttctcgagacgagcgatcgctcccagtcatcatcatcatcctcca

SEQ ID NO: 34362 - DNA, 41 bp, Emericella nidulans
gaattcactgcggccgccatgtcgttcggcgcaagatggtg

SEQ ID NO: 34363 - DNA, 41 bp, Emericella nidulans
gttctcgagacgagcgatcgcgctttgcgacgagccggtgt

SEQ ID NO: 34364 - DNA, 51 bp, Emericella nidulans
gaattcactgcggccgccatgtggtataatctagcccgtaaaagtcagttg

SEQ ID NO: 34365 - DNA, 44 bp, Emericella nidulans
gttctcgagacgagcgatcgctgcggagtggcaatgatgttgag

SEQ ID NO: 34366 - DNA, 45 bp, Emericella nidulans
gaattcactgcggccgccatgtggtgttgaagaggccgtttttgc

SEQ ID NO: 34367 - DNA, 47 bp, Emericella nidulans
gttctcgagacgagcgatcgcgcgagtcaattcataatcagagggac

SEQ ID NO: 34368 - DNA, 42 bp, Emericella nidulans
gaattcactgcggccgccatgtcaccacaaccgtggatacgc

SEQ ID NO: 34369 - DNA, 46 bp, Emericella nidulans
gttctcgagacgagcgatcgctcccgtaaccaagaaccaaagagcc

SEQ ID NO: 34370 - DNA, 41 bp, Emericella nidulans
gaattcactgcggccgccatgtggggttcccaagggtgtca

SEQ ID NO: 34371 - DNA, 42 bp, Emericella nidulans
gttctcgagacgagcgatcgccgccgaaacacccgagctctt

SEQ ID NO: 34372 - DNA, 41 bp, Emericella nidulans
gaattcactgcggccgccatggatgctggcctcctgcgtga

SEQ ID NO: 34373 - DNA, 41 bp, Emericella nidulans
gttctcgagacgagcgatcgccgcaacgccacgagaacgaa

SEQ ID NO: 34374 - DNA, 41 bp, Emericella nidulans
gaattcactgcggccgccatgccgcgcaaccacaaccatca

SEQ ID NO: 34375 - DNA, 40 bp, Emericella nidulans
gttctcgagacgagcgatcgcggaacacgcgaccggggtg

SEQ ID NO: 34376 - DNA, 41 bp, Emericella nidulans
gaattcactgcggccgccatgcgcaaccgcaaagcctccac

SEQ ID NO: 34377 - DNA, 42 bp, Emericella nidulans
gttctcgagacgagcgatcgcgcagcagctggcacggaagtc

SEQ ID NO: 34378 - DNA, 44 bp, Emericella nidulans
gaattcactgcggccgccatgccgatgaggtctaccgccagctc

SEQ ID NO: 34379 - DNA, 41 bp, Emericella nidulans
gttctcgagacgagcgatcgcgagcccgtaggcgcctggat

SEQ ID NO: 34380 - DNA, 52 bp, Emericella nidulans
gaattcactgcggccgccatggctatatctagcctttgtcgaactcttcagg

SEQ ID NO: 34381 - DNA, 41 bp, Emericella nidulans
gttctcgagacgagcgatcgctggccggttcagccacttgc

SEQ ID NO: 34382 - DNA, 41 bp, Emericella nidulans
gaattcactgcggccgccatgacctcaatccgcgccctcct

SEQ ID NO: 34383 - DNA, 41 bp, Emericella nidulans
gttctcgagacgagcgatcgccgcatgcccgctctccaatc

SEQ ID NO: 34384 - DNA, 43 bp, Emericella nidulans
gaattcactgcggccgccatgtccagccaccttagaccgcaaa

SEQ ID NO: 34385 - DNA, 49 bp, Emericella nidulans
gttctcgagacgagcgatcgcttctgctaacctatacgccagtcagctt

SEQ ID NO: 34386 - DNA, 41 bp, Emericella nidulans
gaattcactgcggccgccatgcctccgccccggagtttacg

SEQ ID NO: 34387 - DNA, 41 bp, Emericella nidulans
gttctcgagacgagcgatcgccagcctcgacctgcgcatca

SEQ ID NO: 34388 - DNA, 41 bp, Emericella nidulans
gaattcactgcggccgccatgcccacccctcgaccctgagc

SEQ ID NO: 34389 - DNA, 43 bp, Emericella nidulans
gttctcgagacgagcgatcgccagccattccagtctcgccttg

SEQ ID NO: 34390 - DNA, 41 bp, Emericella nidulans
gaattcactgcggccgccatgggccctcgtttccagggagg

SEQ ID NO: 34391 - DNA, 41 bp, Emericella nidulans
gttctcgagacgagcgatcgccgtcgacacctgcacgcaca

SEQ ID NO: 34392 - DNA, 51 bp, Emericella nidulans
gaattcactgcggccgccatgactctaacaaggtgttctgacggtatgtgg

SEQ ID NO: 34393 - DNA, 41 bp, Emericella nidulans
gttctcgagacgagcgatcgctcttgacccgttcgccacca

SEQ ID NO: 34394 - DNA, 41 bp, Emericella nidulans
gaattcactgcggccgccatgctcatcattggcgccggacc

SEQ ID NO: 34395 - DNA, 41 bp, Emericella nidulans
gttctcgagacgagcgatcgcacctcgtgccgcaaaggagc

SEQ ID NO: 34396 - DNA, 44 bp, Emericella nidulans
gaattcactgcggccgccatggcttccccgaaaaactccaatcc

SEQ ID NO: 34397 - DNA, 43 bp, Emericella nidulans
gttctcgagacgagcgatcgcgcaccagcatagtgccagaggc

SEQ ID NO: 34398 - DNA, 41 bp, Emericella nidulans
gaattcactgcggccgccatgaccggtgccgggtctcgtct

SEQ ID NO: 34399 - DNA, 41 bp, Emericella nidulans
gttctcgagacgagcgatcgcccctccgtcgacaggcatga

SEQ ID NO: 34400 - DNA, 42 bp, Emericella nidulans
gaattcactgcggccgccatgtcgacaatggcagcggtacga

SEQ ID NO: 34401 - DNA, 45 bp, Emericella nidulans
gttctcgagacgagcgatcgccctccggagaggacaatgttgagg

SEQ ID NO: 34402 - DNA, 41 bp, Emericella nidulans
gaattcactgcggccgccatggaagcacgccacccctgcat

SEQ ID NO: 34403 - DNA, 41 bp, Emericella nidulans
gttctcgagacgagcgatcgccagcgcctgaatcccctgga

SEQ ID NO: 34404 - DNA, 41 bp, Emericella nidulans
gaattcactgcggccgccatgtaccacggagggcatgtggc

SEQ ID NO: 34405 - DNA, 47 bp, Emericella nidulans
gttctcgagacgagcgatcgcgcatttatgcataagcgtgtttgtcg

SEQ ID NO: 34406 - DNA, 42 bp, Emericella nidulans
gaattcactgcggccgccatgcagcgcttgcaagggttcgag

SEQ ID NO: 34407 - DNA, 57 bp, Emericella nidulans
gttctcgagacgagcgatcgccgtactattatttgatatacataatcgtggcacctc

SEQ ID NO: 34408 - DNA, 41 bp, Emericella nidulans; identical to SEQ ID NO: 29590

SEQ ID NO: 34409 - DNA, 41 bp, Emericella nidulans; identical to SEQ ID NO: 29591

SEQ ID NO: 34410 - DNA, 41 bp, Emericella nidulans
gaattcactgcggccgccatggaagcgcgcgctatccgact

SEQ ID NO: 34411 - DNA, 44 bp, Emericella nidulans
gttctcgagacgagcgatcgccgacatcaagccaccgtcttttg

SEQ ID NO: 34412 - DNA, 42 bp, Emericella nidulans
gaattcactgcggccgccatgcgtcacgaaccccaagggaca

SEQ ID NO: 34413 - DNA, 41 bp, Emericella nidulans
gttctcgagacgagcgatcgctttatgccggggcgttccac

SEQ ID NO: 34414 - DNA, 41 bp, Emericella nidulans
gaattcactgcggccgccatgcgccccaccgtctccctacc

SEQ ID NO: 34415 - DNA, 44 bp, Emericella nidulans
gttctcgagacgagcgatcgccgctgcctttgtctgcttccttg

SEQ ID NO: 34416 - DNA, 41 bp, Emericella nidulans
gaattcactgcggccgccatgcgtctccgtcgtgcgcctaa

SEQ ID NO: 34417 - DNA, 41 bp, Emericella nidulans
gttctcgagacgagcgatcgccccgcccccgagtctcattg

SEQ ID NO: 34418 - DNA, 41 bp, Emericella nidulans
gaattcactgcggccgccatgctcgcggagaccgtggtggt

SEQ ID NO: 34419 - DNA, 41 bp, Emericella nidulans
gttctcgagacgagcgatcgcgagggctgcgggtgagcttg

SEQ ID NO: 34420 - DNA, 43 bp, Emericella nidulans
gaattcactgcggccgccatgccaccctcgactccatctgcaa

SEQ ID NO: 34421 - DNA, 41 bp, Emericella nidulans
gttctcgagacgagcgatcgcacatgcgtcgatgcccctcc

SEQ ID NO: 34422 - DNA, 46 bp, Emericella nidulans
gaattcactgcggccgccatgggcatcctcgtacatctacgcctca

SEQ ID NO: 34423 - DNA, 52 bp, Emericella nidulans
gttctcgagacgagcgatcgcctgtcatcatatattctgcaaacaaacctct

SEQ ID NO: 34424 - DNA, 40 bp, Emericella nidulans
gaattcactgcggccgccatggcctcctttggcggcaagc

SEQ ID NO: 34425 - DNA, 41 bp, Emericella nidulans
gttctcgagacgagcgatcgccttggccgcatgctccacat

SEQ ID NO: 34426 - DNA, 43 bp, Emericella nidulans
gaattcactgcggccgccatgtggcgccaatacttcccaaagg

SEQ ID NO: 34427 - DNA, 43 bp, Emericella nidulans
gttctcgagacgagcgatcgctcccgaaccctcaattgcccta

SEQ ID NO: 34428 - DNA, 41 bp, Emericella nidulans
gaattcactgcggccgccatgtgcaggaccggacgagtggt

SEQ ID NO: 34429 - DNA, 42 bp, Emericella nidulans
gttctcgagacgagcgatcgcggctcctcgagggctgactgc

SEQ ID NO: 34430 - DNA, 53 bp, Emericella nidulans
gaattcactgcggccgccatgagagatctccctgatcatggagttgctagttg

SEQ ID NO: 34431 - DNA, 43 bp, Emericella nidulans
gttctcgagacgagcgatcgcccatttcatccatgtccgtggg

SEQ ID NO: 34432 - DNA, 42 bp, Emericella nidulans
gaattcactgcggccgccatgcagaagccaacgccgcttacg

SEQ ID NO: 34433 - DNA, 41 bp, Emericella nidulans
gttctcgagacgagcgatcgctgcgttggcctgtcctgctg

SEQ ID NO: 34434 - DNA, 50 bp, Emericella nidulans
gaattcactgcggccgccatgagaggcactgtcgtatactatgtcgtgga

SEQ ID NO: 34435 - DNA, 41 bp, Emericella nidulans
gttctcgagacgagcgatcgccgaggcggccattggttttg

SEQ ID NO: 34436 - DNA, 43 bp, Emericella nidulans
gaattcactgcggccgccatgtcgagctcaaagtgcgcgaatg

SEQ ID NO: 34437 - DNA, 50 bp, Emericella nidulans
gttctcgagacgagcgatcgcatctattgagtcttcagaaccttgggagg

SEQ ID NO: 34438 - DNA, 41 bp, Emericella nidulans
gaattcactgcggccgccatggcaagtcgagcccggacagc

SEQ ID NO: 34439 - DNA, 42 bp, Emericella nidulans
gttctcgagacgagcgatcgccgccacctcgtgtagccagga

SEQ ID NO: 34440 - DNA, 44 bp, Emericella nidulans
gaattcactgcggccgccatgtgatggggcattcttcatcaacg

SEQ ID NO: 34441 - DNA, 41 bp, Emericella nidulans
gttctcgagacgagcgatcgcacccagccaacgcagccaga

SEQ ID NO: 34442 - DNA, 42 bp, Emericella nidulans
gaattcactgcggccgccatggcgcgcaagaacacaccctgt

SEQ ID NO: 34443 - DNA, 44 bp, Emericella nidulans
gttctcgagacgagcgatcgccggtctcttccgagaagggcttg

SEQ ID NO: 34444 - DNA, 48 bp, Emericella nidulans
gaattcactgcggccgccatgttctcgcgatacaccatgtattgaagg

SEQ ID NO: 34445 - DNA, 42 bp, Emericella nidulans
gttctcgagacgagcgatcgctccagctcagcagcaacagca

SEQ ID NO: 34446 - DNA, 44 bp, Emericella nidulans
gaattcactgcggccgccatggcgcactcttgcccaattctctc

SEQ ID NO: 34447 - DNA, 41 bp, Emericella nidulans
gttctcgagacgagcgatcgcgtccacgcggagatcggcac

SEQ ID NO: 34448 - DNA, 41 bp, Emericella nidulans
gaattcactgcggccgccatgtgcctcccgcaagctgtctg

SEQ ID NO: 34449 - DNA, 41 bp, Emericella nidulans
gttctcgagacgagcgatcgcggttgatgggcgaccgaacg

SEQ ID NO: 34450 - DNA, 41 bp, Emericella nidulans
gaattcactgcggccgccatggggccatcccctcgcttcaa

SEQ ID NO: 34451 - DNA, 57 bp, Emericella nidulans
gttctcgagacgagcgatcgcatcttttccatcatcctgtagtcattagatggggac

SEQ ID NO: 34452 - DNA, 39 bp, Emericella nidulans
gaattcactgcggccgccatgcgcgtcgcagtgggcatt

SEQ ID NO: 34453 - DNA, 50 bp, Emericella nidulans
gttctcgagacgagcgatcgcttcgtcctctatccttatactctggcttc

SEQ ID NO: 34454 - DNA, 39 bp, Emericella nidulans; identical to SEQ ID NO: 34452

SEQ ID NO: 34455 - DNA, 50 bp, Emericella nidulans; identical to SEQ ID NO: 34453

SEQ ID NO: 34456 - DNA, 41 bp, Emericella nidulans
gaattcactgcggccgccatgtcgcctggctcgaaaacgaa

SEQ ID NO: 34457 - DNA, 41 bp, Emericella nidulans
gttctcgagacgagcgatcgccgggcgagtctcccgttcaa

SEQ ID NO: 34458 - DNA, 41 bp, Emericella nidulans
gaattcactgcggccgccatggggccgtcactcatccctcc

SEQ ID NO: 34459 - DNA, 41 bp, Emericella nidulans
gttctcgagacgagcgatcgccctctcgtgcctcccaccct

SEQ ID NO: 34460 - DNA, 52 bp, Emericella nidulans
gaattcactgcggccgccatgtctagatatccccagtcattccttacgcaga

SEQ ID NO: 34461 - DNA, 42 bp, Emericella nidulans
gttctcgagacgagcgatcgcgtgccctgggcacactctcca

SEQ ID NO: 34462 - DNA, 43 bp, Emericella nidulans
gaattcactgcggccgccatgcagtccgtttgtggggtctgga

SEQ ID NO: 34463 - DNA, 43 bp, Emericella nidulans
gttctcgagacgagcgatcgctcccgttgttcgctgctcttcc

SEQ ID NO: 34464 - DNA, 43 bp, Emericella nidulans
gaattcactgcggccgccatgggctccttcaccgtggaagctc

SEQ ID NO: 34465 - DNA, 57 bp, Emericella nidulans
gttctcgagacgagcgatcgcaatacttgctcatccagattttccggaagcacctac

SEQ ID NO: 34466 - DNA, 41 bp, Emericella nidulans
gaattcactgcggccgccatgggcgcaacctaaccgcatcc

SEQ ID NO: 34467 - DNA, 43 bp, Emericella nidulans
gttctcgagacgagcgatcgctgaagatttggaccggggcagt

SEQ ID NO: 34468 - DNA, 41 bp, Emericella nidulans
gaattcactgcggccgccatgccggagctcctctcgccaaa

SEQ ID NO: 34469 - DNA, 44 bp, Emericella nidulans
gttctcgagacgagcgatcgcgcagcgttctccctctttgaaat

SEQ ID NO: 34470 - DNA, 42 bp, Emericella nidulans
gaattcactgcggccgccatgcctctcaggcataccgcaacc

SEQ ID NO: 34471 - DNA, 52 bp, Emericella nidulans
gttctcgagacgagcgatcgcggaatgatcaaacagaagatagccagccaga

SEQ ID NO: 34472 - DNA, 51 bp, Emericella nidulans
gaattcactgcggccgccatgaccatggtcaaactgcaatatcttctgtca

SEQ ID NO: 34473 - DNA, 42 bp, Emericella nidulans
gttctcgagacgagcgatcgctgaccgacgccatcagccaat

SEQ ID NO: 34474 - DNA, 41 bp, Emericella nidulans
gaattcactgcggccgccatgcctcgagcgcccagaatccc

SEQ ID NO: 34475 - DNA, 41 bp, Emericella nidulans
gttctcgagacgagcgatcgccgccagggcactcccaggat

SEQ ID NO: 34476 - DNA, 42 bp, Emericella nidulans
gaattcactgcggccgccatgcagcccaaatgggcacaacca

SEQ ID NO: 34477 - DNA, 54 bp, Emericella nidulans
gttctcgagacgagcgatcgcctccaccaggatcttataatgttccacgcgtct

SEQ ID NO: 34478 - DNA, 46 bp, Emericella nidulans
gaattcactgcggccgccatgttgaacatagctatgctcgctgtca

SEQ ID NO: 34479 - DNA, 51 bp, Emericella nidulans
gttctcgagacgagcgatcgcacgcatcaacatttcttttgatctttctgc

SEQ ID NO: 34480 - DNA, 48 bp, Emericella nidulans
gaattcactgcggccgccatgcggctatattagcggcgctatcggtat

SEQ ID NO: 34481 - DNA, 51 bp, Emericella nidulans
gttctcgagacgagcgatcgcgtcgcccactagtttgaatattagccatgt

SEQ ID NO: 34482 - DNA, 39 bp, Emericella nidulans
gaattcactgcggccgccatgccgccatgccatcgctaa

SEQ ID NO: 34483 - DNA, 41 bp, Emericella nidulans
gttctcgagacgagcgatcgctgccttcgcggccttcaatc

SEQ ID NO: 34484 - DNA, 41 bp, Emericella nidulans
gaattcactgcggccgccatgtccgcgcccaattcgaaaac

SEQ ID NO: 34485 - DNA, 57 bp, Emericella nidulans
gttctcgagacgagcgatcgcgtagaaactctccacaatactatccttattcgcaac

SEQ ID NO: 34486 - DNA, 41 bp, Emericella nidulans
gaattcactgcggccgccatgtccgacccgaagaacgaggc

SEQ ID NO: 34487 - DNA, 42 bp, Emericella nidulans
gttctcgagacgagcgatcgctgtcaacccgccgcatatgta

SEQ ID NO: 34488 - DNA, 44 bp, Emericella nidulans
gaattcactgcggccgccatgccgtgacgcaagaagatgggaaa

SEQ ID NO: 34489 - DNA, 47 bp, Emericella nidulans
gttctcgagacgagcgatcgcggaaattacaaggggaagttggaaga

SEQ ID NO: 34490 - DNA, 41 bp, Emericella nidulans
gaattcactgcggccgccatgtctcggcgagcacccgaaac

SEQ ID NO: 34491 - DNA, 50 bp, Emericella nidulans
gttctcgagacgagcgatcgcgagaatagtcccctgaacattctggctca

SEQ ID NO: 34492 - DNA, 52 bp, Emericella nidulans
gaattcactgcggccgccatggacttgtttgatgatgatgaggcatcagttc

SEQ ID NO: 34493 - DNA, 42 bp, Emericella nidulans
gttctcgagacgagcgatcgccgcatgggccccattcctatc

SEQ ID NO: 34494 - DNA, 41 bp, Emericella nidulans
gaattcactgcggccgccatgggctctggtttcggcgctct

SEQ ID NO: 34495 - DNA, 41 bp, Emericella nidulans
gttctcgagacgagcgatcgcctcggcttcttcgccctcca

SEQ ID NO: 34496 - DNA, 41 bp, Emericella nidulans
gaattcactgcggccgccatgcaggccgtggggcaactatg

SEQ ID NO: 34497 - DNA, 57 bp, Emericella nidulans
gttctcgagacgagcgatcgctcagggtatatatctgtccttctaagcagcggcatc

SEQ ID NO: 34498 - DNA, 42 bp, Emericella nidulans
gaattcactgcggccgccatgcgcctgatggtgactgcagga

SEQ ID NO: 34499 - DNA, 43 bp, Emericella nidulans
gttctcgagacgagcgatcgcgcccaattgcagcactggctgt

SEQ ID NO: 34500 - DNA, 44 bp, Emericella nidulans
gaattcactgcggccgccatgcgtgcgtgatcttgtgacgttgg

SEQ ID NO: 34501 - DNA, 40 bp, Emericella nidulans
gttctcgagacgagcgatcgcaggcatcctgcgcccgaat

SEQ ID NO: 34502 - DNA, 41 bp, Emericella nidulans
gaattcactgcggccgccatgtccccgtctgcgcctgctta

SEQ ID NO: 34503 - DNA, 57 bp, Emericella nidulans
gttctcgagacgagcgatcgctacctaccattttgtgaccaaacttactctataacc

SEQ ID NO: 34504 - DNA, 43 bp, Emericella nidulans
gaattcactgcggccgccatgtgaggcatacaagccgtctccc

SEQ ID NO: 34505 - DNA, 44 bp, Emericella nidulans
gttctcgagacgagcgatcgccgcggtcgagtttccactgtagg

SEQ ID NO: 34506 - DNA, 48 bp, Emericella nidulans
gaattcactgcggccgccatggtatcatcatctccaactcccggcttt

SEQ ID NO: 34507 - DNA, 41 bp, Emericella nidulans
gttctcgagacgagcgatcgcagtcgaaccgccgttgggtg

SEQ ID NO: 34508 - DNA, 41 bp, Emericella nidulans
gaattcactgcggccgccatgtcgtcctcgtcggtgacggt

SEQ ID NO: 34509 - DNA, 41 bp, Emericella nidulans
gttctcgagacgagcgatcgcaggtcggcgtcgtcctcgtc

SEQ ID NO: 34510 - DNA, 41 bp, Emericella nidulans
gaattcactgcggccgccatgcctggcctggggtacgagcc

SEQ ID NO: 34511 - DNA, 41 bp, Emericella nidulans
gttctcgagacgagcgatcgcgcatttgcgtggtcccgttc

SEQ ID NO: 34512 - DNA, 52 bp, Emericella nidulans
gaattcactgcggccgccatgggctcaataaactaacatcttctctgcaaaa

SEQ ID NO: 34513 - DNA, 45 bp, Emericella nidulans
gttctcgagacgagcgatcgctctgatgtcggttgtgttgtgtcg

SEQ ID NO: 34514 - DNA, 46 bp, Emericella nidulans
gaattcactgcggccgccatggcgttatctcccatccacatgatgc

SEQ ID NO: 34515 - DNA, 54 bp, Emericella nidulans
gttctcgagacgagcgatcgcagtcgtaaacaaatctcttctatccggattcct

SEQ ID NO: 34516 - DNA, 41 bp, Emericella nidulans
gaattcactgcggccgccatgacgcagtccgacgcgacatc

SEQ ID NO: 34517 - DNA, 41 bp, Emericella nidulans
gttctcgagacgagcgatcgcccccagcatcggcctacagc

SEQ ID NO: 34518 - DNA, 42 bp, Emericella nidulans
gaattcactgcggccgccatgggggtgcgaaccagatggtga

SEQ ID NO: 34519 - DNA, 41 bp, Emericella nidulans
gttctcgagacgagcgatcgcatggtccaccggcgtcaacc

SEQ ID NO: 34520 - DNA, 57 bp, Emericella nidulans
gaattcactgcggccgccatgacacccttgcaaagaagatcatctttagcggaacta

SEQ ID NO: 34521 - DNA, 42 bp, Emericella nidulans
gttctcgagacgagcgatcgctccgcgatcttctcggcaacc

SEQ ID NO: 34522 - DNA, 41 bp, Emericella nidulans
gaattcactgcggccgccatgtggtctgcagcgagcccttg

SEQ ID NO: 34523 - DNA, 41 bp, Emericella nidulans
gttctcgagacgagcgatcgctgacggatgcgccaaaagca

SEQ ID NO: 34524 - DNA, 45 bp, Emericella nidulans
gaattcactgcggccgccatggcctcgtgattaccatgtcgcagt

SEQ ID NO: 34525 - DNA, 46 bp, Emericella nidulans
gttctcgagacgagcgatcgcggggaggaagaaaggatacccacca

SEQ ID NO: 34526 - DNA, 41 bp, Emericella nidulans
gaattcactgcggccgccatgtcaggctcagacccgtcagg

SEQ ID NO: 34527 - DNA, 50 bp, Emericella nidulans
gttctcgagacgagcgatcgcggttgccttcttaatcaatccatccgttg

SEQ ID NO: 34528 - DNA, 41 bp, Emericella nidulans
gaattcactgcggccgccatgcccgcgactatcccgcaaga

SEQ ID NO: 34529 - DNA, 42 bp, Emericella nidulans
gttctcgagacgagcgatcgctcaacctcactcgccgcaacc

SEQ ID NO: 34530 - DNA, 46 bp, Emericella nidulans
gaattcactgcggccgccatggtctgcgatcttgttatttccatgc

SEQ ID NO: 34531 - DNA, 41 bp, Emericella nidulans
gttctcgagacgagcgatcgccagcggtgccgacagcaaga

SEQ ID NO: 34532 - DNA, 41 bp, Emericella nidulans
gaattcactgcggccgccatggcccccgctggcttatctcc

SEQ ID NO: 34533 - DNA, 49 bp, Emericella nidulans
gttctcgagacgagcgatcgcggtcgtttttgttgaaagatcaccgtca

SEQ ID NO: 34534 - DNA, 44 bp, Emericella nidulans
gaattcactgcggccgccatgaaactgggcttttctggcgtatg

SEQ ID NO: 34535 - DNA, 52 bp, Emericella nidulans
gttctcgagacgagcgatcgccgtgataatttcaccctctatatctcgctct

SEQ ID NO: 34536 - DNA, 42 bp, Emericella nidulans
gaattcactgcggccgccatgtcgcggctcctttctccgttc

SEQ ID NO: 34537 - DNA, 50 bp, Emericella nidulans
gttctcgagacgagcgatcgcgatttaagccggactttaattcttcttcc

SEQ ID NO: 34538 - DNA, 42 bp, Emericella nidulans
gaattcactgcggccgccatgcgagagtgccggagtcgtcct

SEQ ID NO: 34539 - DNA, 48 bp, Emericella nidulans
gttctcgagacgagcgatcgcacgaacactctacccgtccactatctg

SEQ ID NO: 34540 - DNA, 42 bp, Emericella nidulans
gaattcactgcggccgccatgccgcttcgagcgacggttaca

SEQ ID NO: 34541 - DNA, 47 bp, Emericella nidulans
gttctcgagacgagcgatcgcggccactatttcaatttcagaaaccc

SEQ ID NO: 34542 - DNA, 41 bp, Emericella nidulans
gaattcactgcggccgccatgaccgataaagcgcgcggtca

SEQ ID NO: 34543 - DNA, 44 bp, Emericella nidulans
gttctcgagacgagcgatcgctggacgctctggaaccactctcc

SEQ ID NO: 34544 - DNA, 41 bp, Emericella nidulans
gaattcactgcggccgccatgcaccagcacccgctcaagca

SEQ ID NO: 34545 - DNA, 49 bp, Emericella nidulans
gttctcgagacgagcgatcgcattaccgttaagcaatccaccgagaaca

SEQ ID NO: 34546 - DNA, 41 bp, Emericella nidulans
gaattcactgcggccgccatgcacgaccggccagttcctcc

SEQ ID NO: 34547 - DNA, 41 bp, Emericella nidulans
gttctcgagacgagcgatcgctgcgccatcgcctgtccata

SEQ ID NO: 34548 - DNA, 45 bp, Emericella nidulans
gaattcactgcggccgccatgcatcctcggctgtttcttcggttg

SEQ ID NO: 34549 - DNA, 41 bp, Emericella nidulans
gttctcgagacgagcgatcgcgcaataaggccggcgcaagg

SEQ ID NO: 34550 - DNA, 41 bp, Emericella nidulans
gaattcactgcggccgccatgcgcttcctcgtgggcctcct

SEQ ID NO: 34551 - DNA, 52 bp, Emericella nidulans
gttctcgagacgagcgatcgccacgccatgaagttataggtgaagatattgc

SEQ ID NO: 34552 - DNA, 46 bp, Emericella nidulans
gaattcactgcggccgccatgtgagagccgtacatacgaccagaca

SEQ ID NO: 34553 - DNA, 41 bp, Emericella nidulans
gttctcgagacgagcgatcgccgccctgaccacctcctcca

SEQ ID NO: 34554 - DNA, 41 bp, Emericella nidulans
gaattcactgcggccgccatgacggctacgcccgcgacttt

SEQ ID NO: 34555 - DNA, 55 bp, Emericella nidulans
gttctcgagacgagcgatcgccttcttatacggaaacgtctccctaaaaacctct

SEQ ID NO: 34556 - DNA, 44 bp, Emericella nidulans
gaattcactgcggccgccatgtcccctgctcttcctgccatttc

SEQ ID NO: 34557 - DNA, 55 bp, Emericella nidulans
gttctcgagacgagcgatcgcatactcgtgttctatatagctatccaagcccata

SEQ ID NO: 34558 - DNA, 47 bp, Emericella nidulans
gaattcactgcggccgccatgcgtcggatgcagctctaagttctgtg

SEQ ID NO: 34559 - DNA, 41 bp, Emericella nidulans
gttctcgagacgagcgatcgctcagaccggcctttgcttcg

SEQ ID NO: 34560 - DNA, 41 bp, Emericella nidulans
gaattcactgcggccgccatgcgccttgtcgccaacgctct

SEQ ID NO: 34561 - DNA, 41 bp, Emericella nidulans
gttctcgagacgagcgatcgcctggctggccctggccaaat

SEQ ID NO: 34562 - DNA, 48 bp, Emericella nidulans
gaattcactgcggccgccatgggaacttctttgcagtatcgtcattca

SEQ ID NO: 34563 - DNA, 42 bp, Emericella nidulans
gttctcgagacgagcgatcgcgccaacttcccgctccagaga

SEQ ID NO: 34564 - DNA, 51 bp, Emericella nidulans
gaattcactgcggccgccatgttcagtcagttttacaccatggatcaatta

SEQ ID NO: 34565 - DNA, 41 bp, Emericella nidulans
gttctcgagacgagcgatcgccgggtgccgtcggagtcaat

SEQ ID NO: 34566 - DNA, 44 bp, Emericella nidulans
gaattcactgcggccgccatgtcgaaaacggcttgtcattgtcc

SEQ ID NO: 34567 - DNA, 41 bp, Emericella nidulans
gttctcgagacgagcgatcgcgtcaacgtcccctcgccacc

SEQ ID NO: 34568 - DNA, 44 bp, Emericella nidulans
gaattcactgcggccgccatgatgctcggacaagagacgagagc

SEQ ID NO: 34569 - DNA, 42 bp, Emericella nidulans
gttctcgagacgagcgatcgctctttcaaccgcgctttgtcg

SEQ ID NO: 34570 - DNA, 41 bp, Emericella nidulans
gaattcactgcggccgccatggcaagaccagcccgtcgaga

SEQ ID NO: 34571 - DNA, 48 bp, Emericella nidulans
gttctcgagacgagcgatcgctgcttgggaatgatcaaagatacagca

SEQ ID NO: 34572 - DNA, 41 bp, Emericella nidulans
gaattcactgcggccgccatgcttcgccgagccgaagatgg

SEQ ID NO: 34573 - DNA, 41 bp, Emericella nidulans
gttctcgagacgagcgatcgcagaccgaacgcggcaagcac

SEQ ID NO: 34574 - DNA, 41 bp, Emericella nidulans
gaattcactgcggccgccatgtggctgcggctgacattggt

SEQ ID NO: 34575 - DNA, 41 bp, Emericella nidulans
gttctcgagacgagcgatcgctccaaacggcccaatcctga

SEQ ID NO: 34576 - DNA, 48 bp, Emericella nidulans; identical to SEQ ID NO: 29766

SEQ ID NO: 34577 - DNA, 44 bp, Emericella nidulans
gttctcgagacgagcgatcgccacagcgatcgacagcttgtgct

SEQ ID NO: 34578 - DNA, 55 bp, Emericella nidulans
gaattcactgcggccgccatgatgagtgttttaagagtagttgaattgaccatga

SEQ ID NO: 34579 - DNA, 41 bp, Emericella nidulans
gttctcgagacgagcgatcgccgtcccgttgagcaggtgga

SEQ ID NO: 34580 - DNA, 42 bp, Emericella nidulans
gaattcactgcggccgccatgtcctgcttgagacccccttca

SEQ ID NO: 34581 - DNA, 42 bp, Emericella nidulans
gttctcgagacgagcgatcgctctccccatcctttgcccaca

SEQ ID NO: 34582 - DNA, 42 bp, Emericella nidulans
gaattcactgcggccgccatgcatggacgtggacggcgttct

SEQ ID NO: 34583 - DNA, 42 bp, Emericella nidulans
gttctcgagacgagcgatcgctgggcagaaggttgcccttga

SEQ ID NO: 34584 - DNA, 42 bp, Emericella nidulans
gaattcactgcggccgccatgcccgctctggaaaaccgtcca

SEQ ID NO: 34585 - DNA, 55 bp, Emericella nidulans
gttctcgagacgagcgatcgctagttggaataattccctaagttgtctcaaacag

SEQ ID NO: 34586 - DNA, 43 bp, Emericella nidulans
gaattcactgcggccgccatgggtgtcagcgcatgatcttgga

SEQ ID NO: 34587 - DNA, 41 bp, Emericella nidulans
gttctcgagacgagcgatcgcgcccaggaattttgcggcac

SEQ ID NO: 34588 - DNA, 51 bp, Emericella nidulans
gaattcactgcggccgccatgcgtcaagaactcatttgagccatacagtcc

SEQ ID NO: 34589 - DNA, 49 bp, Emericella nidulans
gttctcgagacgagcgatcgcgagtcatcgaccttgatgctctgccagt

SEQ ID NO: 34590 - DNA, 50 bp, Emericella nidulans
gaattcactgcggccgccatgccaaagttctagatggctaagtcgcgatg

SEQ ID NO: 34591 - DNA, 41 bp, Emericella nidulans
gttctcgagacgagcgatcgctggccaccctctgcctcgat

SEQ ID NO: 34592 - DNA, 51 bp, Emericella nidulans
gaattcactgcggccgccatgcgacctactacgtaagagatggaaggacaa

SEQ ID NO: 34593 - DNA, 45 bp, Emericella nidulans
gttctcgagacgagcgatcgcctcctctggttcctcttccacgtt

SEQ ID NO: 34594 - DNA, 47 bp, Emericella nidulans
gaattcactgcggccgccatgtgctgctcctatacttcgttccaccc

SEQ ID NO: 34595 - DNA, 52 bp, Emericella nidulans
gttctcgagacgagcgatcgcgtgggttccttatgtaaaggaacatgctacg

SEQ ID NO: 34596 - DNA, 41 bp, Emericella nidulans
gaattcactgcggccgccatggctttcgcacgctgcattgg

SEQ ID NO: 34597 - DNA, 49 bp, Emericella nidulans
gttctcgagacgagcgatcgcagtccaactcttctgatccaaaatgcaa

SEQ ID NO: 34598 - DNA, 41 bp, Emericella nidulans
gaattcactgcggccgccatgcgccatcgcgcagtgtctgt

SEQ ID NO: 34599 - DNA, 41 bp, Emericella nidulans
gttctcgagacgagcgatcgccgcgaaccagctcgtcctgt

SEQ ID NO: 34600 - DNA, 41 bp, Emericella nidulans
gaattcactgcggccgccatggcgccgttcaacgacttcca

SEQ ID NO: 34601 - DNA, 42 bp, Emericella nidulans
gttctcgagacgagcgatcgcccagcaatccagctccgctca

SEQ ID NO: 34602 - DNA, 56 bp, Emericella nidulans
gaattcactgcggccgccatgcaaaacactatgtctccatctagtctcagccctgt

SEQ ID NO: 34603 - DNA, 41 bp, Emericella nidulans
gttctcgagacgagcgatcgcgcacccttcgcgctttctcg

SEQ ID NO: 34604 - DNA, 45 bp, Emericella nidulans
gaattcactgcggccgccatgtcactgccattggaggtaatctcg

SEQ ID NO: 34605 - DNA, 44 bp, Emericella nidulans
gttctcgagacgagcgatcgcattcgaccgcaggctcacaaacc

SEQ ID NO: 34606 - DNA, 48 bp, Emericella nidulans
gaattcactgcggccgccatgcaccaccgcgaacagtactttattgga

SEQ ID NO: 34607 - DNA, 50 bp, Emericella nidulans
gttctcgagacgagcgatcgctacaactcaaacccctttatggattctcc

SEQ ID NO: 34608 - DNA, 56 bp, Emericella nidulans
gaattcactgcggccgccatgtttttcaaccacatataccaggtattctcgcttct

SEQ ID NO: 34609 - DNA, 53 bp, Emericella nidulans
gttctcgagacgagcgatcgctcaaactacactacaacagaaattcccccttc

SEQ ID NO: 34610 - DNA, 41 bp, Emericella nidulans
gaattcactgcggccgccatggatgcgcggcggaagatgac

SEQ ID NO: 34611 - DNA, 41 bp, Emericella nidulans
gttctcgagacgagcgatcgccccatgctgtgcaaggtccc

SEQ ID NO: 34612 - DNA, 41 bp, Emericella nidulans
gaattcactgcggccgccatgccggacgtgaacgcccaaac

SEQ ID NO: 34613 - DNA, 39 bp, Emericella nidulans
gttctcgagacgagcgatcgcatgtcgccccaggcatga

SEQ ID NO: 34614 - DNA, 42 bp, Emericella nidulans
gaattcactgcggccgccatggacggtattcgggggcccatt

SEQ ID NO: 34615 - DNA, 42 bp, Emericella nidulans
gttctcgagacgagcgatcgcgcggcccaagggccttaaaga

SEQ ID NO: 34616 - DNA, 42 bp, Emericella nidulans
gaattcactgcggccgccatgccctttgtcacattcgggctc

SEQ ID NO: 34617 - DNA, 44 bp, Emericella nidulans
gttctcgagacgagcgatcgcgcccaccgatcctgaaaagaacc

SEQ ID NO: 34618 - DNA, 55 bp, Emericella nidulans
gaattcactgcggccgccatgtttttctttccagctaccaggaaatgattaccca

SEQ ID NO: 34619 - DNA, 41 bp, Emericella nidulans
gttctcgagacgagcgatcgcgcgagcaaagttgggcagca

SEQ ID NO: 34620 - DNA, 44 bp, Emericella nidulans
gaattcactgcggccgccatgggcggcattcaagcttctacagg

SEQ ID NO: 34621 - DNA, 43 bp, Emericella nidulans
gttctcgagacgagcgatcgctgacgttggatttgcggtcgag

SEQ ID NO: 34622 - DNA, 41 bp, Emericella nidulans
gaattcactgcggccgccatgtcccccagctgccatcttcg

SEQ ID NO: 34623 - DNA, 41 bp, Emericella nidulans
gttctcgagacgagcgatcgcctcgcgcttgcggtcatcaa

SEQ ID NO: 34624 - DNA, 46 bp, Emericella nidulans
gaattcactgcggccgccatgccgcaggatcaatcacattctcagg

SEQ ID NO: 34625 - DNA, 51 bp, Emericella nidulans
gttctcgagacgagcgatcgcaagatactcttgaaaatgacttgggttgaa

SEQ ID NO: 34626 - DNA, 41 bp, Emericella nidulans
gaattcactgcggccgccatggcgctcaaggccgctgatgt

SEQ ID NO: 34627 - DNA, 41 bp, Emericella nidulans
gttctcgagacgagcgatcgctgcctcctcgtcacccaccc

SEQ ID NO: 34628 - DNA, 47 bp, Emericella nidulans
gaattcactgcggccgccatgcgctccgtcggtttctgtaacctagt

SEQ ID NO: 34629 - DNA, 41 bp, Emericella nidulans
gttctcgagacgagcgatcgctcccctgcccagcattggac

SEQ ID NO: 34630 - DNA, 40 bp, Emericella nidulans
gaattcactgcggccgccatggctcggcgtcgtcgtcctg

SEQ ID NO: 34631 - DNA, 42 bp, Emericella nidulans
gttctcgagacgagcgatcgcccaaaccggcttgactccgta

SEQ ID NO: 34632 - DNA, 41 bp, Emericella nidulans
gaattcactgcggccgccatgcgggcgagcatggcgattac

SEQ ID NO: 34633 - DNA, 42 bp, Emericella nidulans
gttctcgagacgagcgatcgcgggcctgcatacagccccatt

SEQ ID NO: 34634 - DNA, 44 bp, Emericella nidulans
gaattcactgcggccgccatgtgacatttggtcagcggaggagc

SEQ ID NO: 34635 - DNA, 44 bp, Emericella nidulans
gttctcgagacgagcgatcgctgcacgagaccactttcccttcg

SEQ ID NO: 34636 - DNA, 42 bp, Emericella nidulans
gaattcactgcggccgccatgcgcgccctatccattcccaac

SEQ ID NO: 34637 - DNA, 47 bp, Emericella nidulans
gttctcgagacgagcgatcgcgcagcctctccatgattgatacagca

SEQ ID NO: 34638 - DNA, 45 bp, Emericella nidulans
gaattcactgcggccgccatggaaggcgcagatagagcaggcaaa

SEQ ID NO: 34639 - DNA, 50 bp, Emericella nidulans
gttctcgagacgagcgatcgcccgagagataatcagagtcgacatcatcg

SEQ ID NO: 34640 - DNA, 52 bp, Emericella nidulans
gaattcactgcggccgccatgcatctatagattatttggtgacgccagaaag

SEQ ID NO: 34641 - DNA, 41 bp, Emericella nidulans
gttctcgagacgagcgatcgccgggcgtactcgagcgcaaa

SEQ ID NO: 34642 - DNA, 42 bp, Emericella nidulans
gaattcactgcggccgccatgcggtgcagggtttgtcccctc

SEQ ID NO: 34643 - DNA, 43 bp, Emericella nidulans
gttctcgagacgagcgatcgcgacgctccccagacttggatgg

SEQ ID NO: 34644 - DNA, 47 bp, Emericella nidulans
gaattcactgcggccgccatgtgcggatacaggactaaccactgcaa

SEQ ID NO: 34645 - DNA, 51 bp, Emericella nidulans
gttctcgagacgagcgatcgcaagtttcgcaatgagagatcatacaccaca

SEQ ID NO: 34646 - DNA, 44 bp, Emericella nidulans
gaattcactgcggccgccatgggggcattgacgatggtagtggg

SEQ ID NO: 34647 - DNA, 43 bp, Emericella nidulans
gttctcgagacgagcgatcgcgcgcagaccgaaaatccagcct

SEQ ID NO: 34648 - DNA, 41 bp, Emericella nidulans
gaattcactgcggccgccatgccccaccaccgcactggcac

SEQ ID NO: 34649 - DNA, 57 bp, Emericella nidulans
gttctcgagacgagcgatcgcctgaactgttaatctatttaccagtcttaccggagg

SEQ ID NO: 34650 - DNA, 48 bp, Emericella nidulans
gaattcactgcggccgccatgctggtgttcttcgtcacctatatcgtc

SEQ ID NO: 34651 - DNA, 41 bp, Emericella nidulans
gttctcgagacgagcgatcgccagcccgatcagggcgagaa

SEQ ID NO: 34652 - DNA, 41 bp, Emericella nidulans
gaattcactgcggccgccatgcacgcatccaaccgtcagca

SEQ ID NO: 34653 - DNA, 41 bp, Emericella nidulans
gttctcgagacgagcgatcgctggcgcatcctcatccgagt

SEQ ID NO: 34654 - DNA, 49 bp, Emericella nidulans
gaattcactgcggccgccatggctaatatgcttttgtgtcaccggcaga

SEQ ID NO: 34655 - DNA, 41 bp, Emericella nidulans
gttctcgagacgagcgatcgccgcaaggcccctttcgtttg

SEQ ID NO: 34656 - DNA, 42 bp, Emericella nidulans
gaattcactgcggccgccatgtgtgctgcaggagcatggcac

SEQ ID NO: 34657 - DNA, 43 bp, Emericella nidulans
gttctcgagacgagcgatcgcagatcctcgtcggcgatcttgg

SEQ ID NO: 34658 - DNA, 47 bp, Emericella nidulans
gaattcactgcggccgccatggatatcaagactcatgttcgccgtga

SEQ ID NO: 34659 - DNA, 41 bp, Emericella nidulans
gttctcgagacgagcgatcgccgcaaagccgatgcggtcat

SEQ ID NO: 34660 - DNA, 48 bp, Emericella nidulans
gaattcactgcggccgccatgtctacaatgccatcctcctcattagcc

SEQ ID NO: 34661 - DNA, 47 bp, Emericella nidulans
gttctcgagacgagcgatcgcgccactcatattccagagcctgcatc

SEQ ID NO: 34662 - DNA, 41 bp, Emericella nidulans
gaattcactgcggccgccatggagggccatccgggctcagt

SEQ ID NO: 34663 - DNA, 44 bp, Emericella nidulans
gttctcgagacgagcgatcgccccgtccttgaaagagaaccaaa

SEQ ID NO: 34664 - DNA, 57 bp, Emericella nidulans
gaattcactgcggccgccatgtctatttacgatactatgaggtttaatttgagatgg

SEQ ID NO: 34665 - DNA, 41 bp, Emericella nidulans
gttctcgagacgagcgatcgcccggacgcgtggagggagta

SEQ ID NO: 34666 - DNA, 42 bp, Emericella nidulans
gaattcactgcggccgccatggcaaaagtccaagcgcccaca

SEQ ID NO: 34667 - DNA, 41 bp, Emericella nidulans
gttctcgagacgagcgatcgccgtccgcaggtcctcccaat

SEQ ID NO: 34668 - DNA, 41 bp, Emericella nidulans
gaattcactgcggccgccatggcagtagcccaccatgaggc

SEQ ID NO: 34669 - DNA, 46 bp, Emericella nidulans; identical to SEQ ID NO: 33059

SEQ ID NO: 34670 - DNA, 44 bp, Emericella nidulans
gaattcactgcggccgccatgcacgcaaagaccagggctaatca

SEQ ID NO: 34671 - DNA, 41 bp, Emericella nidulans
gttctcgagacgagcgatcgcccccaatgccaccaaaccct

SEQ ID NO: 34672 - DNA, 52 bp, Emericella nidulans
gaattcactgcggccgccatggtagacatgactatacgaagcgtgaataggg

SEQ ID NO: 34673 - DNA, 45 bp, Emericella nidulans
gttctcgagacgagcgatcgccctccacatctcccctctcccaag

SEQ ID NO: 34674 - DNA, 41 bp, Emericella nidulans
gaattcactgcggccgccatgcgacgatacgcctggcaccc

SEQ ID NO: 34675 - DNA, 41 bp, Emericella nidulans
gttctcgagacgagcgatcgcccgccttttcgacggctcaa

SEQ ID NO: 34676 - DNA, 48 bp, Emericella nidulans
gaattcactgcggccgccatgcgtcctctgatgtcgacgtgcagtatt

SEQ ID NO: 34677 - DNA, 41 bp, Emericella nidulans
gttctcgagacgagcgatcgccgagacatcgccgtgccaac

SEQ ID NO: 34678 - DNA, 41 bp, Emericella nidulans
gaattcactgcggccgccatgccccgaatggctcggtttcg

SEQ ID NO: 34679 - DNA, 41 bp, Emericella nidulans
gttctcgagacgagcgatcgccctcctccatggcgctctcg

SEQ ID NO: 34680 - DNA, 42 bp, Emericella nidulans
gaattcactgcggccgccatgcatctttgcaggcgtcggagt

SEQ ID NO: 34681 - DNA, 41 bp, Emericella nidulans
gttctcgagacgagcgatcgccctcgaatgaccgcgtgagg

SEQ ID NO: 34682 - DNA, 42 bp, Emericella nidulans
gaattcactgcggccgccatgtgcgggcctcgattactacgg

SEQ ID NO: 34683 - DNA, 43 bp, Emericella nidulans
gttctcgagacgagcgatcgcgcccccgtaggttttccttcca

SEQ ID NO: 34684 - DNA, 41 bp, Emericella nidulans
gaattcactgcggccgccatggccttggccaagtcgcagga

SEQ ID NO: 34685 - DNA, 46 bp, Emericella nidulans
gttctcgagacgagcgatcgctttgctgaactttggcgagatacga

SEQ ID NO: 34686 - DNA, 42 bp, Emericella nidulans
gaattcactgcggccgccatgtcctcgcagcattcagcaccc

SEQ ID NO: 34687 - DNA, 44 bp, Emericella nidulans
gttctcgagacgagcgatcgctccctcagtctctgtcccctgga

SEQ ID NO: 34688 - DNA, 47 bp, Emericella nidulans
gaattcactgcggccgccatgggtggacttgctgaaggtagaccaat

SEQ ID NO: 34689 - DNA, 41 bp, Emericella nidulans
gttctcgagacgagcgatcgcttgtccactggcgcttgaaa

SEQ ID NO: 34690 - DNA, 44 bp, Emericella nidulans
gaattcactgcggccgccatgtgtcgctcacaaattgtcggttc

SEQ ID NO: 34691 - DNA, 41 bp, Emericella nidulans
gttctcgagacgagcgatcgcctcacgctcgcgcttctcca

SEQ ID NO: 34692 - DNA, 41 bp, Emericella nidulans
gaattcactgcggccgccatgacggcgaggacggctacacg

SEQ ID NO: 34693 - DNA, 55 bp, Emericella nidulans
gttctcgagacgagcgatcgcctcatgactcttatacagcgtgctcgtatccaac

SEQ ID NO: 34694 - DNA, 49 bp, Emericella nidulans
gaattcactgcggccgccatggaatccaatttactcagcttcatggaca

SEQ ID NO: 34695 - DNA, 44 bp, Emericella nidulans
gttctcgagacgagcgatcgccctcgttacggactgtggcagca

SEQ ID NO: 34696 - DNA, 41 bp, Emericella nidulans
gaattcactgcggccgccatgtgccgcgtcggtattcgtca

SEQ ID NO: 34697 - DNA, 42 bp, Emericella nidulans
gttctcgagacgagcgatcgctcagcttcgacagccccctga

SEQ ID NO: 34698 - DNA, 55 bp, Emericella nidulans
gaattcactgcggccgccatgatggttcactccaaagtagttagtatgtgtctct

SEQ ID NO: 34699 - DNA, 42 bp, Emericella nidulans
gttctcgagacgagcgatcgccgccgatgaatcgctcagcct

SEQ ID NO: 34700 - DNA, 47 bp, Emericella nidulans
gaattcactgcggccgccatgtcttccgatgagattgtctggcaggt

SEQ ID NO: 34701 - DNA, 41 bp, Emericella nidulans
gttctcgagacgagcgatcgctctccttcccagcgccctca

SEQ ID NO: 34702 - DNA, 41 bp, Emericella nidulans
gaattcactgcggccgccatgtcaccatggcgcgcgtctac

SEQ ID NO: 34703 - DNA, 42 bp, Emericella nidulans
gttctcgagacgagcgatcgctcctttgcggagatgcattga

SEQ ID NO: 34704 - DNA, 54 bp, Emericella nidulans
gaattcactgcggccgccatgccaccaacaagctctaattgaggtcaaccttct

SEQ ID NO: 34705 - DNA, 44 bp, Emericella nidulans
gttctcgagacgagcgatcgccaatgcggaccctggtgtagtcg

SEQ ID NO: 34706 - DNA, 43 bp, Emericella nidulans
gaattcactgcggccgccatgtgcggacgtggatcttgtcctg

SEQ ID NO: 34707 - DNA, 41 bp, Emericella nidulans
gttctcgagacgagcgatcgccttgccgcaatccgctccat

SEQ ID NO: 34708 - DNA, 57 bp, Emericella nidulans
gaattcactgcggccgccatgctagtgatattttattccctctccatgtattggttg

SEQ ID NO: 34709 - DNA, 55 bp, Emericella nidulans
gttctcgagacgagcgatcgcacattatctctctgattaacgtgtcattcttgga

SEQ ID NO: 34710 - DNA, 47 bp, Emericella nidulans
gaattcactgcggccgccatgtcatccaccaaaatgtccctcgcaga

SEQ ID NO: 34711 - DNA, 41 bp, Emericella nidulans
gttctcgagacgagcgatcgcccccaaacggcgggtacaca

SEQ ID NO: 34712 - DNA, 41 bp, Emericella nidulans
gaattcactgcggccgccatgtccagcaccgcatcggaatg

SEQ ID NO: 34713 - DNA, 53 bp, Emericella nidulans
gttctcgagacgagcgatcgcgtactccttactgaatggatagtccacatagc

SEQ ID NO: 34714 - DNA, 41 bp, Emericella nidulans
gaattcactgcggccgccatggccggacgtcttgcgtcaaa

SEQ ID NO: 34715 - DNA, 48 bp, Emericella nidulans
gttctcgagacgagcgatcgcggcgtaaaatatctcttgaaccgatcc

SEQ ID NO: 34716 - DNA, 50 bp, Emericella nidulans
gaattcactgcggccgccatgtggcttgcactttgcatactaatttgctg

SEQ ID NO: 34717 - DNA, 50 bp, Emericella nidulans
gttctcgagacgagcgatcgcgctacagtttacgggataggccatttttg

SEQ ID NO: 34718 - DNA, 42 bp, Emericella nidulans
gaattcactgcggccgccatggcggaaccccaagaacggcta

SEQ ID NO: 34719 - DNA, 51 bp, Emericella nidulans
gttctcgagacgagcgatcgccgcttaaacaatcgtcctccttttaacacc

SEQ ID NO: 34720 - DNA, 41 bp, Emericella nidulans
gaattcactgcggccgccatgctccccggatggcaactcca

SEQ ID NO: 34721 - DNA, 43 bp, Emericella nidulans
gttctcgagacgagcgatcgctcaccgccttgccctctctctc

SEQ ID NO: 34722 - DNA, 40 bp, Emericella nidulans
gaattcactgcggccgccatgcggctcaatccgcaaccca

SEQ ID NO: 34723 - DNA, 41 bp, Emericella nidulans
gttctcgagacgagcgatcgcaccccgccactggctccttc

SEQ ID NO: 34724 - DNA, 53 bp, Emericella nidulans
gaattcactgcggccgccatggactgttaactatggatatagagccaagacca

SEQ ID NO: 34725 - DNA, 49 bp, Emericella nidulans
gttctcgagacgagcgatcgcctaaacaaagaacttgacctcaccctcc

SEQ ID NO: 34726 - DNA, 41 bp, Emericella nidulans
gaattcactgcggccgccatgtcatcggcggcggtatcatc

SEQ ID NO: 34727 - DNA, 54 bp, Emericella nidulans
gttctcgagacgagcgatcgcagtatttagaaccgtagctaggaccgccgcatc

SEQ ID NO: 34728 - DNA, 54 bp, Emericella nidulans
gaattcactgcggccgccatgttgcatgctaatatgtcctacttagagcgacca

SEQ ID NO: 34729 - DNA, 43 bp, Emericella nidulans
gttctcgagacgagcgatcgctcgacaccgtcttctgtcacca

SEQ ID NO: 34730 - DNA, 41 bp, Emericella nidulans; identical to SEQ ID NO: 34726

SEQ ID NO: 34731 - DNA, 54 bp, Emericella nidulans; identical to SEQ ID NO: 34727

SEQ ID NO: 34732 - DNA, 41 bp, Emericella nidulans
gaattcactgcggccgccatgatctggctcgctgccgttgg

SEQ ID NO: 34733 - DNA, 41 bp, Emericella nidulans
gttctcgagacgagcgatcgccgcatccgctgtgggaatgg

SEQ ID NO: 34734 - DNA, 42 bp, Emericella nidulans
gaattcactgcggccgccatgcgccgcaaattctctgcttcc

SEQ ID NO: 34735 - DNA, 44 bp, Emericella nidulans
gttctcgagacgagcgatcgctgcccactctcaattgacgacca

SEQ ID NO: 34736 - DNA, 42 bp, Emericella nidulans
gaattcactgcggccgccatgggagcgtgtcggacatggtgt

SEQ ID NO: 34737 - DNA, 43 bp, Emericella nidulans
gttctcgagacgagcgatcgcccgtggaaaacatctgcaccaa

SEQ ID NO: 34738 - DNA, 41 bp, Emericella nidulans
gaattcactgcggccgccatgatgatgccggcagcgacgtt

SEQ ID NO: 34739 - DNA, 49 bp, Emericella nidulans
gttctcgagacgagcgatcgccaactggaacaaagtcctcttcttctcc

SEQ ID NO: 34740 - DNA, 41 bp, Emericella nidulans
gaattcactgcggccgccatgatgaagcacggccgctacgc

SEQ ID NO: 34741 - DNA, 43 bp, Emericella nidulans
gttctcgagacgagcgatcgccggtccagttcttccagcgtga

SEQ ID NO: 34742 - DNA, 41 bp, Emericella nidulans
gaattcactgcggccgccatgcgcgcctcgtgagcacttca

SEQ ID NO: 34743 - DNA, 41 bp, Emericella nidulans
gttctcgagacgagcgatcgccagtcgctccccagcaccgt

SEQ ID NO: 34744 - DNA, 44 bp, Emericella nidulans
gaattcactgcggccgccatgcacgcgaagtgatgcagtacagg

SEQ ID NO: 34745 - DNA, 57 bp, Emericella nidulans
gttctcgagacgagcgatcgctttgtctacactttaaaggttgacccagctgccttt

SEQ ID NO: 34746 - DNA, 41 bp, Emericella nidulans
gaattcactgcggccgccatggagcgcgccccaacggttac

SEQ ID NO: 34747 - DNA, 41 bp, Emericella nidulans
gttctcgagacgagcgatcgccgccctcgatccagtgaccc

SEQ ID NO: 34748 - DNA, 44 bp, Emericella nidulans
gaattcactgcggccgccatgcgctcgaggggtactaccgtgct

SEQ ID NO: 34749 - DNA, 46 bp, Emericella nidulans
gttctcgagacgagcgatcgcgcaacatatttggtctcgccggagt

SEQ ID NO: 34750 - DNA, 42 bp, Emericella nidulans
gaattcactgcggccgccatgccgaggcctctgttgctgcac

SEQ ID NO: 34751 - DNA, 51 bp, Emericella nidulans
gttctcgagacgagcgatcgccagggtctatctactcatatcctcaagcag

SEQ ID NO: 34752 - DNA, 44 bp, Emericella nidulans
gaattcactgcggccgccatgtgctggcagcgctaaagattgga

SEQ ID NO: 34753 - DNA, 54 bp, Emericella nidulans
gttctcgagacgagcgatcgctattgtcgcatttagatagccctaggttagttg

SEQ ID NO: 34754 - DNA, 41 bp, Emericella nidulans
gaattcactgcggccgccatgggcctgtccgccgaatcctt

SEQ ID NO: 34755 - DNA, 41 bp, Emericella nidulans
gttctcgagacgagcgatcgcgcaggctcgaaccaccaccc

SEQ ID NO: 34756 - DNA, 43 bp, Emericella nidulans
gaattcactgcggccgccatgcccctttcctttcacacgcacc

SEQ ID NO: 34757 - DNA, 46 bp, Emericella nidulans
gttctcgagacgagcgatcgcgcaatccaagcgataccacgtaccc

SEQ ID NO: 34758 - DNA, 41 bp, Emericella nidulans
gaattcactgcggccgccatgccccaagcgcggtaccatca

SEQ ID NO: 34759 - DNA, 52 bp, Emericella nidulans
gttctcgagacgagcgatcgcattgatattcaccacaggaacaacagtatcc

SEQ ID NO: 34760 - DNA, 42 bp, Emericella nidulans
gaattcactgcggccgccatgcgtagtcagtcccgcccctgt

SEQ ID NO: 34761 - DNA, 50 bp, Emericella nidulans
gttctcgagacgagcgatcgcccctataattctcctcagcaatcttgaca

SEQ ID NO: 34762 - DNA, 50 bp, Emericella nidulans
gaattcactgcggccgccatgtggttcttcacaatcctaacaattggcac

SEQ ID NO: 34763 - DNA, 43 bp, Emericella nidulans
gttctcgagacgagcgatcgctgcttgatgctgcgcacgtaat

SEQ ID NO: 34764 - DNA, 41 bp, Emericella nidulans
gaattcactgcggccgccatgacgggctgcaggtgtctccc

SEQ ID NO: 34765 - DNA, 43 bp, Emericella nidulans
gttctcgagacgagcgatcgctgttggattccccaagcccaag

SEQ ID NO: 34766 - DNA, 41 bp, Emericella nidulans
gaattcactgcggccgccatggcctgatttggcgcccttcc

SEQ ID NO: 34767 - DNA, 41 bp, Emericella nidulans
gttctcgagacgagcgatcgccagcacaaccggcacaacga

SEQ ID NO: 34768 - DNA, 53 bp, Emericella nidulans
gaattcactgcggccgccatgactcaccttttcttaactctcgaaacattgga

SEQ ID NO: 34769 - DNA, 44 bp, Emericella nidulans
gttctcgagacgagcgatcgccacgccctccctgatctctcaca

SEQ ID NO: 34770 - DNA, 42 bp, Emericella nidulans
gaattcactgcggccgccatgggtctcctcgctccccaaacg

SEQ ID NO: 34771 - DNA, 46 bp, Emericella nidulans
gttctcgagacgagcgatcgcaacacaatgcattacccctggagca

SEQ ID NO: 34772 - DNA, 49 bp, Emericella nidulans
gaattcactgcggccgccatgtactcttcttcttccttagcgaaacacg

SEQ ID NO: 34773 - DNA, 41 bp, Emericella nidulans
gttctcgagacgagcgatcgctgcttcgtgcgcggatcttg

SEQ ID NO: 34774 - DNA, 43 bp, Emericella nidulans
gaattcactgcggccgccatggctcgttgccttgatcgtgagc

SEQ ID NO: 34775 - DNA, 41 bp, Emericella nidulans
gttctcgagacgagcgatcgctggcgccaaccttgtgagca

SEQ ID NO: 34776 - DNA, 53 bp, Emericella nidulans
gaattcactgcggccgccatgagagacaattgtagtcattgggtaaaaagtcc

SEQ ID NO: 34777 - DNA, 41 bp, Emericella nidulans
gttctcgagacgagcgatcgccgacgtcctccgcaactccc

SEQ ID NO: 34778 - DNA, 41 bp, Emericella nidulans
gaattcactgcggccgccatgttgcgcaatgctgggaatcg

SEQ ID NO: 34779 - DNA, 42 bp, Emericella nidulans
gttctcgagacgagcgatcgcgactccatgcatacgccaccc

SEQ ID NO: 34780 - DNA, 41 bp, Emericella nidulans
gaattcactgcggccgccatggccacggcgggtcagaatgt

SEQ ID NO: 34781 - DNA, 47 bp, Emericella nidulans
gttctcgagacgagcgatcgccggaattcgcgagattcttttgttcc

SEQ ID NO: 34782 - DNA, 42 bp, Emericella nidulans
gaattcactgcggccgccatgggcttcagcagcagaccgaca

SEQ ID NO: 34783 - DNA, 41 bp, Emericella nidulans
gttctcgagacgagcgatcgctcctcccatgcctcccatgc

SEQ ID NO: 34784 - DNA, 41 bp, Emericella nidulans
gaattcactgcggccgccatgcgttgcagctccgcagacca

SEQ ID NO: 34785 - DNA, 42 bp, Emericella nidulans
gttctcgagacgagcgatcgcgcaaacacaccacccggcttc

SEQ ID NO: 34786 - DNA, 42 bp, Emericella nidulans
gaattcactgcggccgccatgggctcgcgctcaaaatgaccc

SEQ ID NO: 34787 - DNA, 44 bp, Emericella nidulans
gttctcgagacgagcgatcgctgttcatctcgttgcgctcgttg

SEQ ID NO: 34788 - DNA, 41 bp, Emericella nidulans
gaattcactgcggccgccatgaacgccacgcttcccagacg

SEQ ID NO: 34789 - DNA, 54 bp, Emericella nidulans
gttctcgagacgagcgatcgcgtagagttgctagatctcattttcccacggaat

SEQ ID NO: 34790 - DNA, 41 bp, Emericella nidulans
gaattcactgcggccgccatgcgtcctctcgcggtcccaga

SEQ ID NO: 34791 - DNA, 41 bp, Emericella nidulans
gttctcgagacgagcgatcgcatgccggtgaccgaggcact

SEQ ID NO: 34792 - DNA, 41 bp, Emericella nidulans
gaattcactgcggccgccatgctcgtaggcgtggcgcatgg

SEQ ID NO: 34793 - DNA, 41 bp, Emericella nidulans
gttctcgagacgagcgatcgccaggccacccgctggagaag

SEQ ID NO: 34794 - DNA, 41 bp, Emericella nidulans
gaattcactgcggccgccatgtgggtccgcaaacgcagaaa

SEQ ID NO: 34795 - DNA, 41 bp, Emericella nidulans
gttctcgagacgagcgatcgccggctgcggcgagggagtat

SEQ ID NO: 34796 - DNA, 41 bp, Emericella nidulans
gaattcactgcggccgccatgtgggccagccggccttactt

SEQ ID NO: 34797 - DNA, 45 bp, Emericella nidulans
gttctcgagacgagcgatcgcgcagcctggttctcagagagtggg

SEQ ID NO: 34798 - DNA, 41 bp, Emericella nidulans
gaattcactgcggccgccatgcagaccggtgcccacgatcc

SEQ ID NO: 34799 - DNA, 43 bp, Emericella nidulans
gttctcgagacgagcgatcgcgcctgactacggtgcacgctga

SEQ ID NO: 34800 - DNA, 49 bp, Emericella nidulans
gaattcactgcggccgccatgggctacaagtgcaagtccagaaacaaca

SEQ ID NO: 34801 - DNA, 55 bp, Emericella nidulans
gttctcgagacgagcgatcgccctgctttcatttatatgagaagagcagaaggct

SEQ ID NO: 34802 - DNA, 42 bp, Emericella nidulans
gaattcactgcggccgccatgtgggggtgtcgaacacgcaat

SEQ ID NO: 34803 - DNA, 42 bp, Emericella nidulans
gttctcgagacgagcgatcgctccgcttctcccagtcgttcc

SEQ ID NO: 34804 - DNA, 49 bp, Emericella nidulans
gaattcactgcggccgccatggccctactttgatcgtttggattatgtg

SEQ ID NO: 34805 - DNA, 43 bp, Emericella nidulans
gttctcgagacgagcgatcgcccggtcgacttctccgaaaacg

SEQ ID NO: 34806 - DNA, 51 bp, Emericella nidulans
gaattcactgcggccgccatgcttgaaggggatgagctatgtgcacgttat

SEQ ID NO: 34807 - DNA, 41 bp, Emericella nidulans
gttctcgagacgagcgatcgccgacgcttcgcaccccatct

SEQ ID NO: 34808 - DNA, 40 bp, Emericella nidulans
gaattcactgcggccgccatgaacccggccgaatcgcaag

SEQ ID NO: 34809 - DNA, 43 bp, Emericella nidulans
gttctcgagacgagcgatcgcgcgtccgtaatacacccggaac

SEQ ID NO: 34810 - DNA, 41 bp, Emericella nidulans
gaattcactgcggccgccatgcgtgcccagctcaaggctcc

SEQ ID NO: 34811 - DNA, 44 bp, Emericella nidulans
gttctcgagacgagcgatcgcgcctcaagctccttgctgacctg

SEQ ID NO: 34812 - DNA, 42 bp, Emericella nidulans
gaattcactgcggccgccatgccagtcattgcacggcggaaa

SEQ ID NO: 34813 - DNA, 44 bp, Emericella nidulans
gttctcgagacgagcgatcgccatcaccggtccagcggtaaaga

SEQ ID NO: 34814 - DNA, 42 bp, Emericella nidulans
gaattcactgcggccgccatggcatcgatgggcatgggattg

SEQ ID NO: 34815 - DNA, 41 bp, Emericella nidulans
gttctcgagacgagcgatcgcgcaaaccgccccggtacaca

SEQ ID NO: 34816 - DNA, 41 bp, Emericella nidulans
gaattcactgcggccgccatgtcctgcgctctcctcgttgc

SEQ ID NO: 34817 - DNA, 41 bp, Emericella nidulans
gttctcgagacgagcgatcgcgcaccagttccgccgctttg

SEQ ID NO: 34818 - DNA, 48 bp, Emericella nidulans
gaattcactgcggccgccatggttcgtacctacgcatggggagttgat

SEQ ID NO: 34819 - DNA, 44 bp, Emericella nidulans
gttctcgagacgagcgatcgctcgagcctccttcgtcttcttcg

SEQ ID NO: 34820 - DNA, 47 bp, Emericella nidulans
gaattcactgcggccgccatggcgtattactgcctccaaagtcctca

SEQ ID NO: 34821 - DNA, 47 bp, Emericella nidulans
gttctcgagacgagcgatcgcactttctttcccgatcacgtccttcg

SEQ ID NO: 34822 - DNA, 51 bp, Emericella nidulans
gaattcactgcggccgccatgaaagaaaacctcaaaactaacatgtgctcc

SEQ ID NO: 34823 - DNA, 57 bp, Emericella nidulans
gttctcgagacgagcgatcgcaaaaacagtggtagaacacttactagcatcaatctg

SEQ ID NO: 34824 - DNA, 42 bp, Emericella nidulans
gaattcactgcggccgccatgccgtctcaagcggctctggtg

SEQ ID NO: 34825 - DNA, 43 bp, Emericella nidulans
gttctcgagacgagcgatcgctgaggggcactttgctcgtacc

SEQ ID NO: 34826 - DNA, 51 bp, Emericella nidulans
gaattcactgcggccgccatgtttgagctgctcaaggtatgtacaatgcta

SEQ ID NO: 34827 - DNA, 42 bp, Emericella nidulans
gttctcgagacgagcgatcgcccggagacactttgcccagga

SEQ ID NO: 34828 - DNA, 41 bp, Emericella nidulans
gaattcactgcggccgccatgagcgaagtgccggcgatctg

SEQ ID NO: 34829 - DNA, 41 bp, Emericella nidulans
gttctcgagacgagcgatcgcacggcagaggcaggggaagc

SEQ ID NO: 34830 - DNA, 47 bp, Emericella nidulans
gaattcactgcggccgccatgtccagtttcctttgacgctgaaaaca

SEQ ID NO: 34831 - DNA, 49 bp, Emericella nidulans
gttctcgagacgagcgatcgccggctcattatcagcaaccttctctacg

SEQ ID NO: 34832 - DNA, 41 bp, Emericella nidulans
gaattcactgcggccgccatgccgcgtaaccgccagctcac

SEQ ID NO: 34833 - DNA, 44 bp, Emericella nidulans
gttctcgagacgagcgatcgctcagctccatggcctggtaaagc

SEQ ID NO: 34834 - DNA, 42 bp, Emericella nidulans
gaattcactgcggccgccatgcgaccacgaaatcggcgtcaa

SEQ ID NO: 34835 - DNA, 40 bp, Emericella nidulans
gttctcgagacgagcgatcgcgcacggccctgcccttgtt

SEQ ID NO: 34836 - DNA, 44 bp, Emericella nidulans
gaattcactgcggccgccatgtccggcttcttcttggtgttgga

SEQ ID NO: 34837 - DNA, 43 bp, Emericella nidulans
gttctcgagacgagcgatcgccccaggtgaccttccgatctcc

SEQ ID NO: 34838 - DNA, 50 bp, Emericella nidulans
gaattcactgcggccgccatggtcgattcatcatgtatttccttctctcc

SEQ ID NO: 34839 - DNA, 42 bp, Emericella nidulans
gttctcgagacgagcgatcgccaagcatctgtcgcccccaaa

SEQ ID NO: 34840 - DNA, 40 bp, Emericella nidulans
gaattcactgcggccgccatgaatgggcgctgcgctggtc

SEQ ID NO: 34841 - DNA, 43 bp, Emericella nidulans
gttctcgagacgagcgatcgcgcacgaagcaccagacggaaca

SEQ ID NO: 34842 - DNA, 53 bp, Emericella nidulans
gaattcactgcggccgccatggatcacgcattacaacatcattgccaatatca

SEQ ID NO: 34843 - DNA, 55 bp, Emericella nidulans
gttctcgagacgagcgatcgcggcattgagatcaatttttgaagactaaatcacc

SEQ ID NO: 34844 - DNA, 41 bp, Emericella nidulans
gaattcactgcggccgccatgcgacatcagcgcctggcttg

SEQ ID NO: 34845 - DNA, 49 bp, Emericella nidulans
gttctcgagacgagcgatcgcagtcttcaaccgactttgtggaagaaaa

SEQ ID NO: 34846 - DNA, 45 bp, Emericella nidulans
gaattcactgcggccgccatgcaacgtctggcaatagactgggtg

SEQ ID NO: 34847 - DNA, 49 bp, Emericella nidulans
gttctcgagacgagcgatcgctccattaggaataccctgcaaaaacagc

SEQ ID NO: 34848 - DNA, 41 bp, Emericella nidulans
gaattcactgcggccgccatgtctgcgttcgcgagcagtcg

SEQ ID NO: 34849 - DNA, 43 bp, Emericella nidulans
gttctcgagacgagcgatcgcggcagcctggagtctttggtcc

SEQ ID NO: 34850 - DNA, 46 bp, Emericella nidulans
gaattcactgcggccgccatgatgcttcattttcgtaccgaaggct

SEQ ID NO: 34851 - DNA, 41 bp, Emericella nidulans
gttctcgagacgagcgatcgccatcaccgcacgcacatccc

SEQ ID NO: 34852 - DNA, 42 bp, Emericella nidulans
gaattcactgcggccgccatgcgacaagcgctcctccgcaat

SEQ ID NO: 34853 - DNA, 41 bp, Emericella nidulans
gttctcgagacgagcgatcgcactgccggaggcggattcca

SEQ ID NO: 34854 - DNA, 42 bp, Emericella nidulans
gaattcactgcggccgccatgtcatgtctccatcgccggacc

SEQ ID NO: 34855 - DNA, 40 bp, Emericella nidulans
gttctcgagacgagcgatcgccccgccagccctacccctc

SEQ ID NO: 34856 - DNA, 42 bp, Emericella nidulans
gaattcactgcggccgccatgcgccagcaggactgtcgaagg

SEQ ID NO: 34857 - DNA, 41 bp, Emericella nidulans
gttctcgagacgagcgatcgccgcgtcgtatgcgcagatcc

SEQ ID NO: 34858 - DNA, 52 bp, Emericella nidulans
gaattcactgcggccgccatgacgacatcttctctagactcctcaaggtaca

SEQ ID NO: 34859 - DNA, 56 bp, Emericella nidulans
gttctcgagacgagcgatcgcggtctacttaattgtttctggacgagtctcttttc

SEQ ID NO: 34860 - DNA, 57 bp, Emericella nidulans
gaattcactgcggccgccatgatgtctactgacaagatcacgttcttgactaactgg

SEQ ID NO: 34861 - DNA, 41 bp, Emericella nidulans
gttctcgagacgagcgatcgcgccacctccagccggtgaaa

SEQ ID NO: 34862 - DNA, 41 bp, Emericella nidulans
gaattcactgcggccgccatgcgcgccttcttgcgctcttc

SEQ ID NO: 34863 - DNA, 52 bp, Emericella nidulans
gttctcgagacgagcgatcgcagaagcaccttactcagacctcttgaagaca

SEQ ID NO: 34864 - DNA, 41 bp, Emericella nidulans
gaattcactgcggccgccatgcgccttccgtaccgccgatt

SEQ ID NO: 34865 - DNA, 43 bp, Emericella nidulans
gttctcgagacgagcgatcgcccatggcgcatttagcccctta

SEQ ID NO: 34866 - DNA, 42 bp, Emericella nidulans
gaattcactgcggccgccatggaggctgacctgggtgcagat

SEQ ID NO: 34867 - DNA, 41 bp, Emericella nidulans
gttctcgagacgagcgatcgccatccatcccccgctgcaag

SEQ ID NO: 34868 - DNA, 41 bp, Emericella nidulans
gaattcactgcggccgccatgaccggtgcccagatcccgta

SEQ ID NO: 34869 - DNA, 43 bp, Emericella nidulans
gttctcgagacgagcgatcgctgcttggcaggcttctcgtcct

SEQ ID NO: 34870 - DNA, 52 bp, Emericella nidulans
gaattcactgcggccgccatgtggtagtgtcttcctagccatgatttagcct

SEQ ID NO: 34871 - DNA, 43 bp, Emericella nidulans
gttctcgagacgagcgatcgccgcgccctataacagggcatga

SEQ ID NO: 34872 - DNA, 41 bp, Emericella nidulans
gaattcactgcggccgccatgagccacgggcagtggtcgag

SEQ ID NO: 34873 - DNA, 41 bp, Emericella nidulans
gttctcgagacgagcgatcgcttcctccttccgccgctgat

SEQ ID NO: 34874 - DNA, 42 bp, Emericella nidulans
gaattcactgcggccgccatgcgtcgtcagttcggccgcttc

SEQ ID NO: 34875 - DNA, 46 bp, Emericella nidulans
gttctcgagacgagcgatcgcactctaacaacgaaccgggactcca

SEQ ID NO: 34876 - DNA, 49 bp, Emericella nidulans
gaattcactgcggccgccatgtatttgattctctacttccacgccaaca

SEQ ID NO: 34877 - DNA, 50 bp, Emericella nidulans
gttctcgagacgagcgatcgcatttttagcttccaaaaactccttgctga

SEQ ID NO: 34878 - DNA, 41 bp, Emericella nidulans
gaattcactgcggccgccatgccgaagtcggtgccatgggt

SEQ ID NO: 34879 - DNA, 51 bp, Emericella nidulans
gttctcgagacgagcgatcgcgaaatctgtgtccaagaagtcagagtcagc

SEQ ID NO: 34880 - DNA, 45 bp, Emericella nidulans
gaattcactgcggccgccatgtcgcaaatttttcgttggcggtaa

SEQ ID NO: 34881 - DNA, 48 bp, Emericella nidulans
gttctcgagacgagcgatcgccaggcgggcattgacaatatcgacgac

SEQ ID NO: 34882 - DNA, 41 bp, Emericella nidulans
gaattcactgcggccgccatgcgcccgactccaacctcacg

SEQ ID NO: 34883 - DNA, 42 bp, Emericella nidulans
gttctcgagacgagcgatcgctccgggccgagatctccacta

SEQ ID NO: 34884 - DNA, 40 bp, Emericella nidulans
gaattcactgcggccgccatgacgaacccgccgcgaaaaa

SEQ ID NO: 34885 - DNA, 41 bp, Emericella nidulans
gttctcgagacgagcgatcgcgccctccgtctcgccctcac

SEQ ID NO: 34886 - DNA, 41 bp, Emericella nidulans
gaattcactgcggccgccatgctgcaggtggaacggggctc

SEQ ID NO: 34887 - DNA, 42 bp, Emericella nidulans
gttctcgagacgagcgatcgcgctcgacagaccggtgctcca

SEQ ID NO: 34888 - DNA, 42 bp, Emericella nidulans
gaattcactgcggccgccatgggaccagccgtcaacgaaacg

SEQ ID NO: 34889 - DNA, 52 bp, Emericella nidulans
gttctcgagacgagcgatcgcctttagcgacttcttgctgatcggtaagttc

SEQ ID NO: 34890 - DNA, 42 bp, Emericella nidulans
gaattcactgcggccgccatgccggctctccaggaggctgtt

SEQ ID NO: 34891 - DNA, 45 bp, Emericella nidulans
gttctcgagacgagcgatcgccggactcgtgagcaacagagtcaa

SEQ ID NO: 34892 - DNA, 41 bp, Emericella nidulans
gaattcactgcggccgccatgggcttgtcggcggcctgtat

SEQ ID NO: 34893 - DNA, 49 bp, Emericella nidulans
gttctcgagacgagcgatcgctcaacctcttcttttcactttgcatttt

SEQ ID NO: 34894 - DNA, 49 bp, Emericella nidulans
gaattcactgcggccgccatgggactacaaattcgaaggatggatgggt

SEQ ID NO: 34895 - DNA, 44 bp, Emericella nidulans
gttctcgagacgagcgatcgcggcttgatgcctttctccgcaac

SEQ ID NO: 34896 - DNA, 44 bp, Emericella nidulans
gaattcactgcggccgccatgtgtcagcgacggtaccaatgaca

SEQ ID NO: 34897 - DNA, 51 bp, Emericella nidulans
gttctcgagacgagcgatcgccgcacagaatgtagtagtcttgccccgata

SEQ ID NO: 34898 - DNA, 41 bp, Emericella nidulans
gaattcactgcggccgccatgatggtccgcgccagcactct

SEQ ID NO: 34899 - DNA, 44 bp, Emericella nidulans
gttctcgagacgagcgatcgccgacgtcctccaccttctcctcc

SEQ ID NO: 34900 - DNA, 41 bp, Emericella nidulans
gaattcactgcggccgccatgcacaaatcgggcgggtggaa

SEQ ID NO: 34901 - DNA, 41 bp, Emericella nidulans
gttctcgagacgagcgatcgcaccgtcaccccggactgcat

SEQ ID NO: 34902 - DNA, 41 bp, Emericella nidulans
gaattcactgcggccgccatgggcgcaagcttggctctggt

SEQ ID NO: 34903 - DNA, 44 bp, Emericella nidulans
gttctcgagacgagcgatcgcggtctggttctgggtctgaccgt

SEQ ID NO: 34904 - DNA, 41 bp, Emericella nidulans
gaattcactgcggccgccatggctgcagtcaacgcccaggt

SEQ ID NO: 34905 - DNA, 41 bp, Emericella nidulans
gttctcgagacgagcgatcgccgacctggtcgacgggcaag

SEQ ID NO: 34906 - DNA, 51 bp, Emericella nidulans
gaattcactgcggccgccatgccctcagatcctctgctacatgcagaattt

SEQ ID NO: 34907 - DNA, 44 bp, Emericella nidulans
gttctcgagacgagcgatcgcgccgttgacactccacagcttga

SEQ ID NO: 34908 - DNA, 49 bp, Emericella nidulans
gaattcactgcggccgccatgcgtcgagattttggagcagaatacaacc

SEQ ID NO: 34909 - DNA, 48 bp, Emericella nidulans
gttctcgagacgagcgatcgcgctcaccactctctatagctccttcca

SEQ ID NO: 34910 - DNA, 57 bp, Emericella nidulans
gaattcactgcggccgccatgaagcaacaagttccccgaactagttctcgcttcata

SEQ ID NO: 34911 - DNA, 46 bp, Emericella nidulans
gttctcgagacgagcgatcgctccaatcaattagctcattcggtcc

SEQ ID NO: 34912 - DNA, 41 bp, Emericella nidulans
gaattcactgcggccgccatgtttggccgtgtcccgattgc

SEQ ID NO: 34913 - DNA, 40 bp, Emericella nidulans
gttctcgagacgagcgatcgctgcagcccggcacattgtc

SEQ ID NO: 34914 - DNA, 43 bp, Emericella nidulans
gaattcactgcggccgccatgcaaggggtccgtgacctgccta

SEQ ID NO: 34915 - DNA, 41 bp, Emericella nidulans
gttctcgagacgagcgatcgcatgccatgcctccgctttgg

SEQ ID NO: 34916 - DNA, 45 bp, Emericella nidulans
gaattcactgcggccgccatgggcgcattcatattctcggagtcg

SEQ ID NO: 34917 - DNA, 45 bp, Emericella nidulans
gttctcgagacgagcgatcgctcatgctggattcctgtcgtcgag

SEQ ID NO: 34918 - DNA, 45 bp, Emericella nidulans; identical to SEQ ID NO: 34916

SEQ ID NO: 34919 - DNA, 45 bp, Emericella nidulans; identical to SEQ ID NO: 34917

SEQ ID NO: 34920 - DNA, 47 bp, Emericella nidulans
gaattcactgcggccgccatggcaccaaaggagcgatacattgagga

SEQ ID NO: 34921 - DNA, 41 bp, Emericella nidulans
gttctcgagacgagcgatcgccgccgcccattcgacaactt

SEQ ID NO: 34922 - DNA, 46 bp, Emericella nidulans
gaattcactgcggccgccatggcattcaaatgtctccatgtctcca

SEQ ID NO: 34923 - DNA, 43 bp, Emericella nidulans
gttctcgagacgagcgatcgccgcctcagccctcagcttttga

SEQ ID NO: 34924 - DNA, 41 bp, Emericella nidulans
gaattcactgcggccgccatgacccgcctgcggcctctagt

SEQ ID NO: 34925 - DNA, 41 bp, Emericella nidulans
gttctcgagacgagcgatcgcaggatcgagccgccgttgac

SEQ ID NO: 34926 - DNA, 42 bp, Emericella nidulans
gaattcactgcggccgccatgcgctctcttggtcgggggaaa

SEQ ID NO: 34927 - DNA, 43 bp, Emericella nidulans
gttctcgagacgagcgatcgcgacagcgtcgatggcttgttgc

SEQ ID NO: 34928 - DNA, 42 bp, Emericella nidulans
gaattcactgcggccgccatgcgaccttgcgttccctcacca

SEQ ID NO: 34929 - DNA, 42 bp, Emericella nidulans
gttctcgagacgagcgatcgcgcgcagcttcttcgagcgact

SEQ ID NO: 34930 - DNA, 41 bp, Emericella nidulans
gaattcactgcggccgccatgtcctggtcactggcgggctc

SEQ ID NO: 34931 - DNA, 55 bp, Emericella nidulans
gttctcgagacgagcgatcgcggctcagtttttaacagcatcataaagtaacacc

SEQ ID NO: 34932 - DNA, 43 bp, Emericella nidulans
gaattcactgcggccgccatgtcgaccttctcccctccatcca

SEQ ID NO: 34933 - DNA, 41 bp, Emericella nidulans
gttctcgagacgagcgatcgcgcctgcgccgctttctgagt

SEQ ID NO: 34934 - DNA, 43 bp, Emericella nidulans
gaattcactgcggccgccatggccacctacagcgccaaaatgg

SEQ ID NO: 34935 - DNA, 41 bp, Emericella nidulans
gttctcgagacgagcgatcgctttctgcgacgcccttctcc

SEQ ID NO: 34936 - DNA, 41 bp, Emericella nidulans
gaattcactgcggccgccatggcctcagggcctggctccaa

SEQ ID NO: 34937 - DNA, 41 bp, Emericella nidulans
gttctcgagacgagcgatcgcttccaccccgtcttcgccac

SEQ ID NO: 34938 - DNA, 41 bp, Emericella nidulans
gaattcactgcggccgccatggcgggaccgcaccaatctgt

SEQ ID NO: 34939 - DNA, 44 bp, Emericella nidulans
gttctcgagacgagcgatcgctatcatccccaccaccagaagga

SEQ ID NO: 34940 - DNA, 41 bp, Emericella nidulans
gaattcactgcggccgccatggtttggcgcccccatgaaag

SEQ ID NO: 34941 - DNA, 41 bp, Emericella nidulans
gttctcgagacgagcgatcgccctttccctgcaccgcttgc

SEQ ID NO: 34942 - DNA, 42 bp, Emericella nidulans
gaattcactgcggccgccatgtggtggccgaaacagtgtccc

SEQ ID NO: 34943 - DNA, 42 bp, Emericella nidulans
gttctcgagacgagcgatcgcgcctcggcaatgatccaggct

SEQ ID NO: 34944 - DNA, 42 bp, Emericella nidulans; identical to SEQ ID NO: 34928

SEQ ID NO: 34945 - DNA, 42 bp, Emericella nidulans
gttctcgagacgagcgatcgccccagtccttgcgcagcttct

SEQ ID NO: 34946 - DNA, 44 bp, Emericella nidulans
gaattcactgcggccgccatgtccggaattggttccttgcatca

SEQ ID NO: 34947 - DNA, 41 bp, Emericella nidulans
gttctcgagacgagcgatcgcggagaccatccgctgccacc

SEQ ID NO: 34948 - DNA, 45 bp, Emericella nidulans
gaattcactgcggccgccatgtgctgagtgggagattgactgtgc

SEQ ID NO: 34949 - DNA, 41 bp, Emericella nidulans
gttctcgagacgagcgatcgcaaccaagaccgccgcatcgt

SEQ ID NO: 34950 - DNA, 48 bp, Emericella nidulans
gaattcactgcggccgccatgctttcttcgtctgctcagagcatcatc

SEQ ID NO: 34951 - DNA, 43 bp, Emericella nidulans
gttctcgagacgagcgatcgctgacaggcaggaaagcggaaca

SEQ ID NO: 34952 - DNA, 41 bp, Emericella nidulans
gaattcactgcggccgccatgggcgtctgccagttgcatgg

SEQ ID NO: 34953 - DNA, 41 bp, Emericella nidulans
gttctcgagacgagcgatcgcgcgcgccccaggacatattg

SEQ ID NO: 34954 - DNA, 41 bp, Emericella nidulans
gaattcactgcggccgccatgcggacaagcttccccctccc

SEQ ID NO: 34955 - DNA, 40 bp, Emericella nidulans
gttctcgagacgagcgatcgccgcgatcacggtcgcggta

SEQ ID NO: 34956 - DNA, 41 bp, Emericella nidulans
gaattcactgcggccgccatggtcaagcgcccctggctgaa

SEQ ID NO: 34957 - DNA, 50 bp, Emericella nidulans
gttctcgagacgagcgatcgcgtacatgtggcgtgtagaagaagtcgatg

SEQ ID NO: 34958 - DNA, 42 bp, Emericella nidulans
gaattcactgcggccgccatggactgggttagccgggcctca

SEQ ID NO: 34959 - DNA, 51 bp, Emericella nidulans
gttctcgagacgagcgatcgcagtcaatacagtagacgaaggagacgttgg

SEQ ID NO: 34960 - DNA, 42 bp, Emericella nidulans; identical to SEQ ID NO: 34958

SEQ ID NO: 34961 - DNA, 51 bp, Emericella nidulans; identical to SEQ ID NO: 34959

SEQ ID NO: 34962 - DNA, 41 bp, Emericella nidulans
gaattcactgcggccgccatgcgccaacaaccggcgatcag

SEQ ID NO: 34963 - DNA, 56 bp, Emericella nidulans
gttctcgagacgagcgatcgctatatgtatatacaacacgattaccctcgacaact

SEQ ID NO: 34964 - DNA, 41 bp, Emericella nidulans
gaattcactgcggccgccatgcgcaaagacgatggcccaaa

SEQ ID NO: 34965 - DNA, 46 bp, Emericella nidulans
gttctcgagacgagcgatcgccagcaccagactcggattcaggaag

SEQ ID NO: 34966 - DNA, 48 bp, Emericella nidulans
gaattcactgcggccgccatgagcagttcatcgtttgtatctcgggtt

SEQ ID NO: 34967 - DNA, 41 bp, Emericella nidulans
gttctcgagacgagcgatcgccgcggcggttcgctgagaat

SEQ ID NO: 34968 - DNA, 41 bp, Emericella nidulans
gaattcactgcggccgccatgtttgggctccaagccctccc

SEQ ID NO: 34969 - DNA, 44 bp, Emericella nidulans
gttctcgagacgagcgatcgcggatcaggccatggtcttgccta

SEQ ID NO: 34970 - DNA, 41 bp, Emericella nidulans
gaattcactgcggccgccatgcctctggcgaccacctgcac

SEQ ID NO: 34971 - DNA, 41 bp, Emericella nidulans
gttctcgagacgagcgatcgcccctgccatgacctcgtccc

SEQ ID NO: 34972 - DNA, 52 bp, Emericella nidulans
gaattcactgcggccgccatgttccccgagtgctactactacttctttcagc

SEQ ID NO: 34973 - DNA, 44 bp, Emericella nidulans
gttctcgagacgagcgatcgcgcgtcccaaccagttatgcttga

SEQ ID NO: 34974 - DNA, 48 bp, Emericella nidulans
gaattcactgcggccgccatgatcccatcgacaagctaaggactaaca

SEQ ID NO: 34975 - DNA, 49 bp, Emericella nidulans
gttctcgagacgagcgatcgcacctttaatgccttgttgatgctctctg

SEQ ID NO: 34976 - DNA, 41 bp, Emericella nidulans
gaattcactgcggccgccatgtcggggcactgggctcaaga

SEQ ID NO: 34977 - DNA, 47 bp, Emericella nidulans
gttctcgagacgagcgatcgcccaagaccaagaccagataacagggt

SEQ ID NO: 34978 - DNA, 50 bp, Emericella nidulans
gaattcactgcggccgccatgtaacaatcaacacgttaggatgcttttgc

SEQ ID NO: 34979 - DNA, 41 bp, Emericella nidulans
gttctcgagacgagcgatcgctcgacgactgggccctggtt

SEQ ID NO: 34980 - DNA, 41 bp, Emericella nidulans
gaattcactgcggccgccatgattgcggcactgcagcctcc

SEQ ID NO: 34981 - DNA, 49 bp, Emericella nidulans
gttctcgagacgagcgatcgcaagctaaacaaacggtagcaccagatga

SEQ ID NO: 34982 - DNA, 43 bp, Emericella nidulans
gaattcactgcggccgccatgtctgctgtcgtgcgttggctta

SEQ ID NO: 34983 - DNA, 42 bp, Emericella nidulans
gttctcgagacgagcgatcgctctgcagcgccttgaagcaca

SEQ ID NO: 34984 - DNA, 41 bp, Emericella nidulans
gaattcactgcggccgccatgaccgccactggtgcctggtc

SEQ ID NO: 34985 - DNA, 47 bp, Emericella nidulans
gttctcgagacgagcgatcgccatgttccagcatgtgatcgaagctc

SEQ ID NO: 34986 - DNA, 41 bp, Emericella nidulans
gaattcactgcggccgccatgttggatgggaccgcgaggaa

SEQ ID NO: 34987 - DNA, 56 bp, Emericella nidulans
gttctcgagacgagcgatcgcagggtacctaatctatgactgcatcgtcgccatac

SEQ ID NO: 34988 - DNA, 41 bp, Emericella nidulans
gaattcactgcggccgccatgacacgccctttggccgcttt

SEQ ID NO: 34989 - DNA, 42 bp, Emericella nidulans
gttctcgagacgagcgatcgccatcctccgtgcgcaggtaca

SEQ ID NO: 34990 - DNA, 41 bp, Emericella nidulans
gaattcactgcggccgccatgagttgtgggagcggccgaga

SEQ ID NO: 34991 - DNA, 43 bp, Emericella nidulans
gttctcgagacgagcgatcgcccaccttggaaagcccgtccat

SEQ ID NO: 34992 - DNA, 40 bp, Emericella nidulans
gaattcactgcggccgccatgcgccccgcaaacgttcaag

SEQ ID NO: 34993 - DNA, 41 bp, Emericella nidulans
gttctcgagacgagcgatcgccacggcctgtccaccactcg

SEQ ID NO: 34994 - DNA, 49 bp, Emericella nidulans
gaattcactgcggccgccatgttttctgactttgacgctggtcataggg

SEQ ID NO: 34995 - DNA, 43 bp, Emericella nidulans
gttctcgagacgagcgatcgccgagccattccccggatagagc

SEQ ID NO: 34996 - DNA, 41 bp, Emericella nidulans
gaattcactgcggccgccatgggcacacgaatctgctgcaa

SEQ ID NO: 34997 - DNA, 53 bp, Emericella nidulans
gttctcgagacgagcgatcgctattcatagtaaatccggttacagagcgtgcc

SEQ ID NO: 34998 - DNA, 41 bp, Emericella nidulans
gaattcactgcggccgccatgtcaaccacctcggctctccc

SEQ ID NO: 34999 - DNA, 47 bp, Emericella nidulans
gttctcgagacgagcgatcgctgtgggtatctctggtgtttcgaatg

SEQ ID NO: 35000 - DNA, 41 bp, Emericella nidulans
gaattcactgcggccgccatgcccacgcggacacaacctga

SEQ ID NO: 35001 - DNA, 52 bp, Emericella nidulans
gttctcgagacgagcgatcgcctacataaatcgtcgccaatatcacgtctca

SEQ ID NO: 35002 - DNA, 46 bp, Emericella nidulans
gaattcactgcggccgccatgtggccaagaagcagaaacaagacga

SEQ ID NO: 35003 - DNA, 39 bp, Emericella nidulans
gttctcgagacgagcgatcgcccaggccggggcttgctc

SEQ ID NO: 35004 - DNA, 41 bp, Emericella nidulans
gaattcactgcggccgccatgccaacccacgggcgtaccac

SEQ ID NO: 35005 - DNA, 45 bp, Emericella nidulans
gttctcgagacgagcgatcgcgcttcaaagacccatggcatctcg

SEQ ID NO: 35006 - DNA, 49 bp, Emericella nidulans
gaattcactgcggccgccatggtttacctcgcttcttgggtatctgctg

SEQ ID NO: 35007 - DNA, 54 bp, Emericella nidulans
gttctcgagacgagcgatcgctgcgaattaatctatttgctcaagtaggcgtag

SEQ ID NO: 35008 - DNA, 53 bp, Emericella nidulans
gaattcactgcggccgccatgatctgtcgatctgaagctatgcgtcgagaaac

SEQ ID NO: 35009 - DNA, 54 bp, Emericella nidulans
gttctcgagacgagcgatcgcatcatgctacgcagacaaaatcttgcttgtaat

SEQ ID NO: 35010 - DNA, 42 bp, Emericella nidulans
gaattcactgcggccgccatggccgttgacgcagtgctttcc

SEQ ID NO: 35011 - DNA, 56 bp, Emericella nidulans
gttctcgagacgagcgatcgcctgcatgtgtacaataaacataggtatctaactca

SEQ ID NO: 35012 - DNA, 48 bp, Emericella nidulans
gaattcactgcggccgccatgcagggtcccaatatatgcagcttcttc

SEQ ID NO: 35013 - DNA, 50 bp, Emericella nidulans
gttctcgagacgagcgatcgcagttcagcttcgggatatcttagggttgc

SEQ ID NO: 35014 - DNA, 42 bp, Emericella nidulans
gaattcactgcggccgccatgccggcaccgaccagctactga

SEQ ID NO: 35015 - DNA, 42 bp, Emericella nidulans
gttctcgagacgagcgatcgcgcttcacggccttcacgcact

SEQ ID NO: 35016 - DNA, 41 bp, Emericella nidulans
gaattcactgcggccgccatgcggaggtgcgggaatgggtt

SEQ ID NO: 35017 - DNA, 42 bp, Emericella nidulans
gttctcgagacgagcgatcgctctgccgcatgctcagatcca

SEQ ID NO: 35018 - DNA, 43 bp, Emericella nidulans
gaattcactgcggccgccatgtggccgagttcattcgctctga

SEQ ID NO: 35019 - DNA, 41 bp, Emericella nidulans
gttctcgagacgagcgatcgccggccgtggattccttttgg

SEQ ID NO: 35020 - DNA, 44 bp, Emericella nidulans
gaattcactgcggccgccatgtcgcatcaatgccgataccaagg

SEQ ID NO: 35021 - DNA, 41 bp, Emericella nidulans
gttctcgagacgagcgatcgccgggctgcgctcaacaacaa

SEQ ID NO: 35022 - DNA, 41 bp, Emericella nidulans
gaattcactgcggccgccatgtggttgccgtagcggctggt

SEQ ID NO: 35023 - DNA, 41 bp, Emericella nidulans
gttctcgagacgagcgatcgcccatccgtcggctccatgct

SEQ ID NO: 35024 - DNA, 48 bp, Emericella nidulans
gaattcactgcggccgccatgtgatggttcaaccaaaagtgaggcaaa

SEQ ID NO: 35025 - DNA, 44 bp, Emericella nidulans
gttctcgagacgagcgatcgctcactcgctcagcaatccgaagc

SEQ ID NO: 35026 - DNA, 54 bp, Emericella nidulans
gaattcactgcggccgccatggagttggtttagttgtgatccatactgatttga

SEQ ID NO: 35027 - DNA, 42 bp, Emericella nidulans
gttctcgagacgagcgatcgcggcgtctgcatgtcggtcgag

SEQ ID NO: 35028 - DNA, 40 bp, Emericella nidulans
gaattcactgcggccgccatgccggcgcctacgacaggct

SEQ ID NO: 35029 - DNA, 56 bp, Emericella nidulans
gttctcgagacgagcgatcgcgagggcagtgttatcttaaggtagccatctcatca

SEQ ID NO: 35030 - DNA, 41 bp, Emericella nidulans
gaattcactgcggccgccatgcgcgttgatgctggcagtcg

SEQ ID NO: 35031 - DNA, 42 bp, Emericella nidulans
gttctcgagacgagcgatcgcccagcaccaccaccatgtccc

SEQ ID NO: 35032 - DNA, 41 bp, Emericella nidulans
gaattcactgcggccgccatgcccgaactaccgagcgcaca

SEQ ID NO: 35033 - DNA, 41 bp, Emericella nidulans
gttctcgagacgagcgatcgctcttgtgccgccctctccaa

SEQ ID NO: 35034 - DNA, 51 bp, Emericella nidulans
gaattcactgcggccgccatgtttaggagtacgtcgatcaaaaacacaacg

SEQ ID NO: 35035 - DNA, 47 bp, Emericella nidulans
gttctcgagacgagcgatcgcgcgacccagtttcttagagcttttcc

SEQ ID NO: 35036 - DNA, 47 bp, Emericella nidulans
gaattcactgcggccgccatggcagcacgtcatgtacgttaaaccca

SEQ ID NO: 35037 - DNA, 50 bp, Emericella nidulans
gttctcgagacgagcgatcgcagctcctttttcctgtgtaaactcccaaa

SEQ ID NO: 35038 - DNA, 41 bp, Emericella nidulans
gaattcactgcggccgccatgaccggggagcacagcgatca

SEQ ID NO: 35039 - DNA, 47 bp, Emericella nidulans
gttctcgagacgagcgatcgccatactgaatattcgggctcgcagga

SEQ ID NO: 35040 - DNA, 41 bp, Emericella nidulans
gaattcactgcggccgccatgggcggtggtggtgggatcaa

SEQ ID NO: 35041 - DNA, 41 bp, Emericella nidulans
gttctcgagacgagcgatcgcgccagaggcccctgactgct

SEQ ID NO: 35042 - DNA, 45 bp, Emericella nidulans
gaattcactgcggccgccatgggaccatgaagggtctaccgatgc

SEQ ID NO: 35043 - DNA, 41 bp, Emericella nidulans
gttctcgagacgagcgatcgcccgaaaccccctcaggtcca

SEQ ID NO: 35044 - DNA, 41 bp, Emericella nidulans
gaattcactgcggccgccatgccggcgccactgcaggtaag

SEQ ID NO: 35045 - DNA, 41 bp, Emericella nidulans
gttctcgagacgagcgatcgcgctgctgtggcttgcgttgg

SEQ ID NO: 35046 - DNA, 41 bp, Emericella nidulans
gaattcactgcggccgccatgactgcttgctcgcggcttgg

SEQ ID NO: 35047 - DNA, 46 bp, Emericella nidulans
gttctcgagacgagcgatcgccagcaccatcatgaatttcggatca

SEQ ID NO: 35048 - DNA, 52 bp, Emericella nidulans
gaattcactgcggccgccatgaaacaaacttttatcacccgcacaatatgga

SEQ ID NO: 35049 - DNA, 47 bp, Emericella nidulans
gttctcgagacgagcgatcgcacctgcaaaagttagccagcgtacca

SEQ ID NO: 35050 - DNA, 44 bp, Emericella nidulans
gaattcactgcggccgccatgcgacaacgagccaacagctctga

SEQ ID NO: 35051 - DNA, 41 bp, Emericella nidulans
gttctcgagacgagcgatcgcaggtggggttgcatgcctga

SEQ ID NO: 35052 - DNA, 41 bp, Emericella nidulans
gaattcactgcggccgccatggcgacgccatctcaggcatc

SEQ ID NO: 35053 - DNA, 41 bp, Emericella nidulans
gttctcgagacgagcgatcgcgctcctcggtagccccagca

SEQ ID NO: 35054 - DNA, 41 bp, Emericella nidulans
gaattcactgcggccgccatgcgccaggacattgacaaccc

SEQ ID NO: 35055 - DNA, 41 bp, Emericella nidulans
gttctcgagacgagcgatcgcccggttgagcacaacgtggc

SEQ ID NO: 35056 - DNA, 47 bp, Emericella nidulans
gaattcactgcggccgccatgtcacagaactacggagagtaccagca

SEQ ID NO: 35057 - DNA, 44 bp, Emericella nidulans
gttctcgagacgagcgatcgccaaccaagacacccttggctccc

SEQ ID NO: 35058 - DNA, 47 bp, Emericella nidulans
gaattcactgcggccgccatgatattgatgccatacccacaaatggt

SEQ ID NO: 35059 - DNA, 55 bp, Emericella nidulans
gttctcgagacgagcgatcgcacaaaaggcttcaattaacatataaggaaagatg

SEQ ID NO: 35060 - DNA, 42 bp, Emericella nidulans
gaattcactgcggccgccatggcagcaccaggaagccgatcc

SEQ ID NO: 35061 - DNA, 45 bp, Emericella nidulans
gttctcgagacgagcgatcgctgggcgaatactccgtacagttgg

SEQ ID NO: 35062 - DNA, 40 bp, Emericella nidulans
gaattcactgcggccgccatggctcgccaagagcgcatcg

SEQ ID NO: 35063 - DNA, 43 bp, Emericella nidulans
gttctcgagacgagcgatcgcgggtcgtaagcacccaggctca

SEQ ID NO: 35064 - DNA, 41 bp, Emericella nidulans
gaattcactgcggccgccatggcgcggtgcggatcgtattc

SEQ ID NO: 35065 - DNA, 40 bp, Emericella nidulans
gttctcgagacgagcgatcgcctcctcgcgcgccctcttc

SEQ ID NO: 35066 - DNA, 41 bp, Emericella nidulans
gaattcactgcggccgccatgtcgtcgagcatcccgcaaga

SEQ ID NO: 35067 - DNA, 41 bp, Emericella nidulans
gttctcgagacgagcgatcgccgcgcaacagcgaggaggat

SEQ ID NO: 35068 - DNA, 41 bp, Emericella nidulans
gaattcactgcggccgccatgcgtgaattcgtcggggttcg

SEQ ID NO: 35069 - DNA, 54 bp, Emericella nidulans
gttctcgagacgagcgatcgctgataggcttataaacaaaagactcaaacttcg

SEQ ID NO: 35070 - DNA, 46 bp, Emericella nidulans
gaattcactgcggccgccatggggacccaggatctagactccacca

SEQ ID NO: 35071 - DNA, 42 bp, Emericella nidulans
gttctcgagacgagcgatcgccagtgaaccgaccgggcttga

SEQ ID NO: 35072 - DNA, 42 bp, Emericella nidulans
gaattcactgcggccgccatgcgatgcatcccagggaaatgg

SEQ ID NO: 35073 - DNA, 57 bp, Emericella nidulans
gttctcgagacgagcgatcgctaccccactattgataattagctacaaaaacggaga

SEQ ID NO: 35074 - DNA, 41 bp, Emericella nidulans
gaattcactgcggccgccatggtagcccccgaaccgaaagc

SEQ ID NO: 35075 - DNA, 41 bp, Emericella nidulans
gttctcgagacgagcgatcgcaacttcgcggtggcggtctg

SEQ ID NO: 35076 - DNA, 56 bp, Emericella nidulans
gaattcactgcggccgccatgattatttattacttcaatgccgggctcggtatcac

SEQ ID NO: 35077 - DNA, 42 bp, Emericella nidulans
gttctcgagacgagcgatcgccccatcgatgcaggctttgag

SEQ ID NO: 35078 - DNA, 41 bp, Emericella nidulans
gaattcactgcggccgccatggcgcttcagcatccgaaccc

SEQ ID NO: 35079 - DNA, 47 bp, Emericella nidulans
gttctcgagacgagcgatcgccacctagagaagcatggacgaccaga

SEQ ID NO: 35080 - DNA, 44 bp, Emericella nidulans
gaattcactgcggccgccatgtggccatcatgcttgcagactca

SEQ ID NO: 35081 - DNA, 43 bp, Emericella nidulans
gttctcgagacgagcgatcgcgctcacgattccctcgccaaga

SEQ ID NO: 35082 - DNA, 41 bp, Emericella nidulans
gaattcactgcggccgccatgcgccgcgcgtgaatcttttc

SEQ ID NO: 35083 - DNA, 40 bp, Emericella nidulans
gttctcgagacgagcgatcgcagcgggctgcatcccatcg

SEQ ID NO: 35084 - DNA, 41 bp, Emericella nidulans
gaattcactgcggccgccatgccgagcaaggcctccacgtc

SEQ ID NO: 35085 - DNA, 42 bp, Emericella nidulans
gttctcgagacgagcgatcgctgaattgtcgttgcgcgggta

SEQ ID NO: 35086 - DNA, 43 bp, Emericella nidulans
gaattcactgcggccgccatgcccgccagatacctgacgatga

SEQ ID NO: 35087 - DNA, 41 bp, Emericella nidulans
gttctcgagacgagcgatcgctctccaattcggcgggctca

SEQ ID NO: 35088 - DNA, 42 bp, Emericella nidulans
gaattcactgcggccgccatgcgctgatcagcatggcgaacc

SEQ ID NO: 35089 - DNA, 49 bp, Emericella nidulans
gttctcgagacgagcgatcgctgcaaactcagtatctcgagcagctcac

SEQ ID NO: 35090 - DNA, 44 bp, Emericella nidulans
gaattcactgcggccgccatgcgcctcttctgcatcttaggtga

SEQ ID NO: 35091 - DNA, 42 bp, Emericella nidulans
gttctcgagacgagcgatcgctcgccctgcaactccttcagc

SEQ ID NO: 35092 - DNA, 41 bp, Emericella nidulans
gaattcactgcggccgccatgatgtggcgccgtggttggtt

SEQ ID NO: 35093 - DNA, 41 bp, Emericella nidulans
gttctcgagacgagcgatcgccgccccaacctccttcagca

SEQ ID NO: 35094 - DNA, 44 bp, Emericella nidulans
gaattcactgcggccgccatgtgcccttcgtgctcaacataagc

SEQ ID NO: 35095 - DNA, 55 bp, Emericella nidulans
gttctcgagacgagcgatcgcttatcagtaacctgttcttctatcgggtttagga

SEQ ID NO: 35096 - DNA, 42 bp, Emericella nidulans
gaattcactgcggccgccatgcgacaaccccggtaccgtctc

SEQ ID NO: 35097 - DNA, 45 bp, Emericella nidulans
gttctcgagacgagcgatcgcacttcccctcctccatctctttga

SEQ ID NO: 35098 - DNA, 43 bp, Emericella nidulans
gaattcactgcggccgccatgtgccgtcgaccactagacgaga

SEQ ID NO: 35099 - DNA, 41 bp, Emericella nidulans
gttctcgagacgagcgatcgccggaggcgcttcttcgctcc

SEQ ID NO: 35100 - DNA, 41 bp, Emericella nidulans
gaattcactgcggccgccatgctgcgagcgcgatttcgatg

SEQ ID NO: 35101 - DNA, 41 bp, Emericella nidulans
gttctcgagacgagcgatcgcgcgtcgtctccgtccgatga

SEQ ID NO: 35102 - DNA, 52 bp, Emericella nidulans
gaattcactgcggccgccatgcgaagactgtccctttataaataatggcctc

SEQ ID NO: 35103 - DNA, 41 bp, Emericella nidulans
gttctcgagacgagcgatcgcccggccatacccatgccagt

SEQ ID NO: 35104 - DNA, 41 bp, Emericella nidulans
gaattcactgcggccgccatgggcacgcatcgccaactcct

SEQ ID NO: 35105 - DNA, 50 bp, Emericella nidulans
gttctcgagacgagcgatcgcccactacacgttaatcgtacaggtctccc

SEQ ID NO: 35106 - DNA, 43 bp, Emericella nidulans
gaattcactgcggccgccatgtgacacaattcgcgccattgaa

SEQ ID NO: 35107 - DNA, 55 bp, Emericella nidulans
gttctcgagacgagcgatcgcagtagaatttgaggtcatccggattgacaaaagg

SEQ ID NO: 35108 - DNA, 45 bp, Emericella nidulans
gaattcactgcggccgccatggcggtacgaaactagtcgcccaag

SEQ ID NO: 35109 - DNA, 41 bp, Emericella nidulans
gttctcgagacgagcgatcgcccccgacgagcgatccagaa

SEQ ID NO: 35110 - DNA, 41 bp, Emericella nidulans
gaattcactgcggccgccatgcggccagatcggcacaccac

SEQ ID NO: 35111 - DNA, 43 bp, Emericella nidulans
gttctcgagacgagcgatcgccgccatgaatgacaccccagtg

SEQ ID NO: 35112 - DNA, 46 bp, Emericella nidulans
gaattcactgcggccgccatgcagcaaatgccaagttcaacaagca

SEQ ID NO: 35113 - DNA, 48 bp, Emericella nidulans
gttctcgagacgagcgatcgcgctcatcttgaggattgtgttgtcgtg

SEQ ID NO: 35114 - DNA, 45 bp, Emericella nidulans
gaattcactgcggccgccatgagctgcggcagatttaccagtgga

SEQ ID NO: 35115 - DNA, 41 bp, Emericella nidulans
gttctcgagacgagcgatcgccgccggtctgaacggtctcc

SEQ ID NO: 35116 - DNA, 43 bp, Emericella nidulans
gaattcactgcggccgccatgtccacggagaaagggtgggatg

SEQ ID NO: 35117 - DNA, 42 bp, Emericella nidulans
gttctcgagacgagcgatcgccatgcatcgtcaccgtcgtca

SEQ ID NO: 35118 - DNA, 48 bp, Emericella nidulans
gaattcactgcggccgccatgacattgtcaatcccaatacccctatca

SEQ ID NO: 35119 - DNA, 42 bp, Emericella nidulans
gttctcgagacgagcgatcgcccacgggtgtttcagggcatc

SEQ ID NO: 35120 - DNA, 40 bp, Emericella nidulans
gaattcactgcggccgccatgaggacggcgaagcgacacg

SEQ ID NO: 35121 - DNA, 48 bp, Emericella nidulans
gttctcgagacgagcgatcgcatacccccatcgacaatcatcatctca

SEQ ID NO: 35122 - DNA, 41 bp, Emericella nidulans
gaattcactgcggccgccatgcgggcacgcaggaaccgata

SEQ ID NO: 35123 - DNA, 41 bp, Emericella nidulans
gttctcgagacgagcgatcgccatgctgccctcctccgtga

SEQ ID NO: 35124 - DNA, 41 bp, Emericella nidulans
gaattcactgcggccgccatgctaacgggcggcctccgaac

SEQ ID NO: 35125 - DNA, 42 bp, Emericella nidulans
gttctcgagacgagcgatcgctctccccacccctcctcctcc

SEQ ID NO: 35126 - DNA, 45 bp, Emericella nidulans
gaattcactgcggccgccatgtcacctggactcatcagacgcaca

SEQ ID NO: 35127 - DNA, 41 bp, Emericella nidulans
gttctcgagacgagcgatcgccgccatcggagccaaagtcc

SEQ ID NO: 35128 - DNA, 42 bp, Emericella nidulans; identical to SEQ ID NO: 29806

SEQ ID NO: 35129 - DNA, 52 bp, Emericella nidulans
gttctcgagacgagcgatcgcgagaagtatgagacttcactcctccatagcc

SEQ ID NO: 35130 - DNA, 45 bp, Emericella nidulans
gaattcactgcggccgccatgcgcgttctctcgacttttgcctgt

SEQ ID NO: 35131 - DNA, 41 bp, Emericella nidulans
gttctcgagacgagcgatcgcgggggacacaacggcagctt

SEQ ID NO: 35132 - DNA, 41 bp, Emericella nidulans
gaattcactgcggccgccatggccggcgacgtacgtgttga

SEQ ID NO: 35133 - DNA, 42 bp, Emericella nidulans
gttctcgagacgagcgatcgctcggcgtagcgaggatcttga

SEQ ID NO: 35134 - DNA, 41 bp, Emericella nidulans
gaattcactgcggccgccatgggccgcagacttcgcaagaa

SEQ ID NO: 35135 - DNA, 43 bp, Emericella nidulans
gttctcgagacgagcgatcgctcaacagtcgcccatcctgctg

SEQ ID NO: 35136 - DNA, 41 bp, Emericella nidulans
gaattcactgcggccgccatggcgcgaggcgttacgtcgaa

SEQ ID NO: 35137 - DNA, 41 bp, Emericella nidulans
gttctcgagacgagcgatcgcgaggccgtcgacctcctcca

SEQ ID NO: 35138 - DNA, 41 bp, Emericella nidulans
gaattcactgcggccgccatggatggagcagcgcacgatgg

SEQ ID NO: 35139 - DNA, 46 bp, Emericella nidulans
gttctcgagacgagcgatcgcgctgcttcaagtgtagggctcggta

SEQ ID NO: 35140 - DNA, 41 bp, Emericella nidulans
gaattcactgcggccgccatggacgcgcgcgaccttctcat

SEQ ID NO: 35141 - DNA, 43 bp, Emericella nidulans
gttctcgagacgagcgatcgctctgccttggtctcgtcggttt

SEQ ID NO: 35142 - DNA, 41 bp, Emericella nidulans
gaattcactgcggccgccatggcggacaggggttgcgagac

SEQ ID NO: 35143 - DNA, 52 bp, Emericella nidulans
gttctcgagacgagcgatcgcggttactgctcctgtctgtatattccgggtc

SEQ ID NO: 35144 - DNA, 42 bp, Emericella nidulans
gaattcactgcggccgccatggcagggtcctcgaccacacca

SEQ ID NO: 35145 - DNA, 41 bp, Emericella nidulans
gttctcgagacgagcgatcgcggatcagaacgcagccatcc

SEQ ID NO: 35146 - DNA, 48 bp, Emericella nidulans
gaattcactgcggccgccatgatattacggcacaactcaccaaaatca

SEQ ID NO: 35147 - DNA, 56 bp, Emericella nidulans
gttctcgagacgagcgatcgcatttcaacatagtcaacagcaagctgtttcagaac

SEQ ID NO: 35148 - DNA, 41 bp, Emericella nidulans
gaattcactgcggccgccatgaccccaacacgggcatctcg

SEQ ID NO: 35149 - DNA, 42 bp, Emericella nidulans
gttctcgagacgagcgatcgctcgcggttcttgaagcccatt

SEQ ID NO: 35150 - DNA, 46 bp, Emericella nidulans
gaattcactgcggccgccatgatggtactcgtccgacttgctcttc

SEQ ID NO: 35151 - DNA, 42 bp, Emericella nidulans
gttctcgagacgagcgatcgccgtcaattccgccattggtga

SEQ ID NO: 35152 - DNA, 46 bp, Emericella nidulans
gaattcactgcggccgccatgggagagggaaaaatgtccagagtcg

SEQ ID NO: 35153 - DNA, 47 bp, Emericella nidulans
gttctcgagacgagcgatcgcagttgatctgcaggtgattttgagga

SEQ ID NO: 35154 - DNA, 41 bp, Emericella nidulans
gaattcactgcggccgccatgagcagatgccgcctcaggga

SEQ ID NO: 35155 - DNA, 46 bp, Emericella nidulans
gttctcgagacgagcgatcgcccgcatgatctcctcgtaaatcaga

SEQ ID NO: 35156 - DNA, 49 bp, Emericella nidulans
gaattcactgcggccgccatggggtcctctgttttcatcatgagatcct

SEQ ID NO: 35157 - DNA, 41 bp, Emericella nidulans
gttctcgagacgagcgatcgccgccgcgtgatttctcaatg

SEQ ID NO: 35158 - DNA, 47 bp, Emericella nidulans
gaattcactgcggccgccatggccacgaagtttgaagacaatgagga

SEQ ID NO: 35159 - DNA, 44 bp, Emericella nidulans
gttctcgagacgagcgatcgcggctcacgaatctaggacgccac

SEQ ID NO: 35160 - DNA, 49 bp, Emericella nidulans
gaattcactgcggccgccatgtgtcttgtcgattccctgaagaagaagc

SEQ ID NO: 35161 - DNA, 41 bp, Emericella nidulans
gttctcgagacgagcgatcgcacggcgctccctctccaacc

SEQ ID NO: 35162 - DNA, 43 bp, Emericella nidulans
gaattcactgcggccgccatgtgccggtgttgacatagcaagg

SEQ ID NO: 35163 - DNA, 46 bp, Emericella nidulans
gttctcgagacgagcgatcgcggcgctaaaagagccaacataaaca

SEQ ID NO: 35164 - DNA, 46 bp, Emericella nidulans
gaattcactgcggccgccatgcaaccaccaaacgtcaaactcttgt

SEQ ID NO: 35165 - DNA, 46 bp, Emericella nidulans
gttctcgagacgagcgatcgcggagcttcttgatcttccgccagtc

SEQ ID NO: 35166 - DNA, 44 bp, Emericella nidulans
gaattcactgcggccgccatgtcacgacaggcgagaaatgagga

SEQ ID NO: 35167 - DNA, 43 bp, Emericella nidulans
gttctcgagacgagcgatcgcttcagagcttcgctcggggaaa

SEQ ID NO: 35168 - DNA, 45 bp, Emericella nidulans
gaattcactgcggccgccatgttctctgcacgcgtcttactcctt

SEQ ID NO: 35169 - DNA, 54 bp, Emericella nidulans
gttctcgagacgagcgatcgcctaagccgttccaaatttgtaaacagccagatt

SEQ ID NO: 35170 - DNA, 55 bp, Emericella nidulans
gaattcactgcggccgccatggttcagatcaaggactttgctgtggagcaagtat

SEQ ID NO: 35171 - DNA, 42 bp, Emericella nidulans
gttctcgagacgagcgatcgctgccttcaatttcgccaaccc

SEQ ID NO: 35172 - DNA, 41 bp, Emericella nidulans
gaattcactgcggccgccatggcgggacatggcagggaatc

SEQ ID NO: 35173 - DNA, 42 bp, Emericella nidulans
gttctcgagacgagcgatcgctccggatctggttcgtcttcg

SEQ ID NO: 35174 - DNA, 41 bp, Emericella nidulans
gaattcactgcggccgccatgtcctcccgctccctccgact

SEQ ID NO: 35175 - DNA, 41 bp, Emericella nidulans
gttctcgagacgagcgatcgcctcacggcagggggtgcatt

SEQ ID NO: 35176 - DNA, 42 bp, Emericella nidulans
gaattcactgcggccgccatgtgcgagtgactggctgggtcc

SEQ ID NO: 35177 - DNA, 54 bp, Emericella nidulans
gttctcgagacgagcgatcgcacatgtactgtagtgattatggttggaatgttg

SEQ ID NO: 35178 - DNA, 42 bp, Emericella nidulans
gaattcactgcggccgccatgtcctcgcaaccacggaatcca

SEQ ID NO: 35179 - DNA, 52 bp, Emericella nidulans
gttctcgagacgagcgatcgctggctgataccaacaactaatactgcaatga

SEQ ID NO: 35180 - DNA, 45 bp, Emericella nidulans
gaattcactgcggccgccatggggacgcaacgtaattgcgacaac

SEQ ID NO: 35181 - DNA, 46 bp, Emericella nidulans
gttctcgagacgagcgatcgccctgccgtagcttgagaatttgcat

SEQ ID NO: 35182 - DNA, 41 bp, Emericella nidulans
gaattcactgcggccgccatgtcctgccacggttcgaggtg

SEQ ID NO: 35183 - DNA, 51 bp, Emericella nidulans
gttctcgagacgagcgatcgcatggtctggcacctgcaagatatcattatt

SEQ ID NO: 35184 - DNA, 56 bp, Emericella nidulans
gaattcactgcggccgccatgtcaaactatagcgataccgaagttcatagattatt

SEQ ID NO: 35185 - DNA, 41 bp, Emericella nidulans
gttctcgagacgagcgatcgcttgcaacccccattcccgta

SEQ ID NO: 35186 - DNA, 41 bp, Emericella nidulans
gaattcactgcggccgccatgggggccaatccagctgagca

SEQ ID NO: 35187 - DNA, 41 bp, Emericella nidulans
gttctcgagacgagcgatcgctgccctaggcacccggaaca

SEQ ID NO: 35188 - DNA, 55 bp, Emericella nidulans
gaattcactgcggccgccatgctttatttctcctttctcttttgtttgccaggct

SEQ ID NO: 35189 - DNA, 41 bp, Emericella nidulans
gttctcgagacgagcgatcgccggggtaagggtcgcgtgaa

SEQ ID NO: 35190 - DNA, 41 bp, Emericella nidulans
gaattcactgcggccgccatgcgccagtcctgccggttctc

SEQ ID NO: 35191 - DNA, 47 bp, Emericella nidulans
gttctcgagacgagcgatcgcctctgtcacagccccagtacctctgc

SEQ ID NO: 35192 - DNA, 43 bp, Emericella nidulans
gaattcactgcggccgccatgtccgatcctcacgtcgctgttc

SEQ ID NO: 35193 - DNA, 49 bp, Emericella nidulans
gttctcgagacgagcgatcgccacagactagccctactacaccttctcg

SEQ ID NO: 35194 - DNA, 54 bp, Emericella nidulans
gaattcactgcggccgccatgaatggctctgttactatctctcagccttcttgc

SEQ ID NO: 35195 - DNA, 48 bp, Emericella nidulans
gttctcgagacgagcgatcgccgcctggaaagtactgccaatatcacc

SEQ ID NO: 35196 - DNA, 43 bp, Emericella nidulans
gaattcactgcggccgccatggggctggtcttttggtgcgttc

SEQ ID NO: 35197 - DNA, 44 bp, Emericella nidulans
gttctcgagacgagcgatcgcggcatacttgcaacccaatcaca

SEQ ID NO: 35198 - DNA, 41 bp, Emericella nidulans
gaattcactgcggccgccatgcgccggcgtgaccagctact

SEQ ID NO: 35199 - DNA, 48 bp, Emericella nidulans
gttctcgagacgagcgatcgccattgtatttgtcgctggtagcgaact

SEQ ID NO: 35200 - DNA, 42 bp, Emericella nidulans
gaattcactgcggccgccatgccacctcatcggaccgctgtt

SEQ ID NO: 35201 - DNA, 42 bp, Emericella nidulans
gttctcgagacgagcgatcgccaccgccacatgatagcgaga

SEQ ID NO: 35202 - DNA, 41 bp, Emericella nidulans
gaattcactgcggccgccatgcatgccgcggctggacagta

SEQ ID NO: 35203 - DNA, 41 bp, Emericella nidulans
gttctcgagacgagcgatcgcgtccagctggcatgcgcaaa

SEQ ID NO: 35204 - DNA, 41 bp, Emericella nidulans
gaattcactgcggccgccatgcccaccgacgcctgcaaaag

SEQ ID NO: 35205 - DNA, 41 bp, Emericella nidulans
gttctcgagacgagcgatcgcccccggccgttcttcgagta

SEQ ID NO: 35206 - DNA, 41 bp, Emericella nidulans
gaattcactgcggccgccatgcaccgccccaaagctcgaaa

SEQ ID NO: 35207 - DNA, 42 bp, Emericella nidulans
gttctcgagacgagcgatcgctgcttcgcggtgactttgtcg

SEQ ID NO: 35208 - DNA, 41 bp, Emericella nidulans
gaattcactgcggccgccatggctttcctcgcctgtgtgcc

SEQ ID NO: 35209 - DNA, 43 bp, Emericella nidulans
gttctcgagacgagcgatcgcccttttcgtccgcgtctttgga

SEQ ID NO: 35210 - DNA, 42 bp, Emericella nidulans
gaattcactgcggccgccatgccgttcatcatggcgctcgac

SEQ ID NO: 35211 - DNA, 46 bp, Emericella nidulans
gttctcgagacgagcgatcgctcgacacagctacctccttgtcgtc

SEQ ID NO: 35212 - DNA, 41 bp, Emericella nidulans
gaattcactgcggccgccatgtcaacggcgaccgtctatgg

SEQ ID NO: 35213 - DNA, 41 bp, Emericella nidulans
gttctcgagacgagcgatcgcgcactgccttgccgaggacc

SEQ ID NO: 35214 - DNA, 41 bp, Emericella nidulans; identical to SEQ ID NO: 35212

SEQ ID NO: 35215 - DNA, 41 bp, Emericella nidulans; identical to SEQ ID NO: 35213

SEQ ID NO: 35216 - DNA, 42 bp, Emericella nidulans
gaattcactgcggccgccatgtggcgcaccaagactccaagc

SEQ ID NO: 35217 - DNA, 49 bp, Emericella nidulans
gttctcgagacgagcgatcgcaaatccggttatcctcaaacggcccata

SEQ ID NO: 35218 - DNA, 47 bp, Emericella nidulans
gaattcactgcggccgccatgtttttacttttctttgtgccgccaat

SEQ ID NO: 35219 - DNA, 53 bp, Emericella nidulans
gttctcgagacgagcgatcgctacgtaaatagaagcaggacattacgctgacc

SEQ ID NO: 35220 - DNA, 47 bp, Emericella nidulans; identical to SEQ ID NO: 35218

SEQ ID NO: 35221 - DNA, 53 bp, Emericella nidulans; identical to SEQ ID NO: 35219

SEQ ID NO: 35222 - DNA, 42 bp, Emericella nidulans
gaattcactgcggccgccatgccatggtctctggcacgcaaa

SEQ ID NO: 35223 - DNA, 42 bp, Emericella nidulans
gttctcgagacgagcgatcgctcgaccgtatgacccgcgcta

SEQ ID NO: 35224 - DNA, 45 bp, Emericella nidulans
gaattcactgcggccgccatgtcccgaaggagaggtatcagtcca

SEQ ID NO: 35225 - DNA, 41 bp, Emericella nidulans
gttctcgagacgagcgatcgcttgcatcgcctcggaagcct

SEQ ID NO: 35226 - DNA, 43 bp, Emericella nidulans
gaattcactgcggccgccatgctcgatgaggcagaggcgctga

SEQ ID NO: 35227 - DNA, 57 bp, Emericella nidulans
gttctcgagacgagcgatcgcataatcctgttctgtaagaaattggccgagtttgag

SEQ ID NO: 35228 - DNA, 41 bp, Emericella nidulans
gaattcactgcggccgccatgcgggcaggaagcatcgcaag

SEQ ID NO: 35229 - DNA, 41 bp, Emericella nidulans
gttctcgagacgagcgatcgcgcacgcccaggggaatttga

SEQ ID NO: 35230 - DNA, 41 bp, Emericella nidulans
gaattcactgcggccgccatgaccgcgacgatgccttggac

SEQ ID NO: 35231 - DNA, 54 bp, Emericella nidulans
gttctcgagacgagcgatcgcgaattcaaaatcgtaatacacataggccgtgta

SEQ ID NO: 35232 - DNA, 44 bp, Emericella nidulans
gaattcactgcggccgccatgggaaagagggagggaaggggagg

SEQ ID NO: 35233 - DNA, 41 bp, Emericella nidulans
gttctcgagacgagcgatcgcttggcctgtcggcattgagc

SEQ ID NO: 35234 - DNA, 41 bp, Emericella nidulans
gaattcactgcggccgccatggcctccggaggcattggtca

SEQ ID NO: 35235 - DNA, 42 bp, Emericella nidulans
gttctcgagacgagcgatcgctgagcgaattcgacgcccttg

SEQ ID NO: 35236 - DNA, 42 bp, Emericella nidulans
gaattcactgcggccgccatgaagccagggccgtcttgtcta

SEQ ID NO: 35237 - DNA, 40 bp, Emericella nidulans
gttctcgagacgagcgatcgccgcgatgtcggcgaaccag

SEQ ID NO: 35238 - DNA, 43 bp, Emericella nidulans
gaattcactgcggccgccatgcgtcatctgtccgagacgctca

SEQ ID NO: 35239 - DNA, 41 bp, Emericella nidulans
gttctcgagacgagcgatcgctttgcgcgcgacagttttcc

SEQ ID NO: 35240 - DNA, 42 bp, Emericella nidulans
gaattcactgcggccgccatgtggcgtgccacgtttctgaac

SEQ ID NO: 35241 - DNA, 41 bp, Emericella nidulans
gttctcgagacgagcgatcgctctggcgttcggggagaaca

SEQ ID NO: 35242 - DNA, 45 bp, Emericella nidulans; identical to SEQ ID NO: 35180

SEQ ID NO: 35243 - DNA, 41 bp, Emericella nidulans
gttctcgagacgagcgatcgcggagggcctccactgctccc

SEQ ID NO: 35244 - DNA, 41 bp, Emericella nidulans
gaattcactgcggccgccatgtcgacgcccttgatccccac

SEQ ID NO: 35245 - DNA, 41 bp, Emericella nidulans
gttctcgagacgagcgatcgccgcgttcccaccacggaaga

SEQ ID NO: 35246 - DNA, 44 bp, Emericella nidulans
gaattcactgcggccgccatggcttctgtgctgctgggctatgc

SEQ ID NO: 35247 - DNA, 41 bp, Emericella nidulans
gttctcgagacgagcgatcgcccaacggcaccgttgccaag

SEQ ID NO: 35248 - DNA, 42 bp, Emericella nidulans
gaattcactgcggccgccatgtcacctcacagcaggccacga

SEQ ID NO: 35249 - DNA, 51 bp, Emericella nidulans
gttctcgagacgagcgatcgcagtgtatggacacacatgtgcgtatctttt

SEQ ID NO: 35250 - DNA, 50 bp, Emericella nidulans
gaattcactgcggccgccatgtcaaaacactcccttttgctgatatccat

SEQ ID NO: 35251 - DNA, 56 bp, Emericella nidulans
gttctcgagacgagcgatcgcaagatgtaaccaactagcacaggaataaacatatc

SEQ ID NO: 35252 - DNA, 45 bp, Emericella nidulans
gaattcactgcggccgccatgccggaatcgcctgtatatcccaga

SEQ ID NO: 35253 - DNA, 41 bp, Emericella nidulans
gttctcgagacgagcgatcgcatgcggatatcggcggtgga

SEQ ID NO: 35254 - DNA, 45 bp, Emericella nidulans
gaattcactgcggccgccatgtcatgtcagtttcccaccgtttgc

SEQ ID NO: 35255 - DNA, 41 bp, Emericella nidulans
gttctcgagacgagcgatcgcttttcgggtcccccggaagc

SEQ ID NO: 35256 - DNA, 49 bp, Emericella nidulans
gaattcactgcggccgccatggttgccagaatgatcatgttgggtatca

SEQ ID NO: 35257 - DNA, 42 bp, Emericella nidulans
gttctcgagacgagcgatcgcgcaacctcgctttcggcatcc

SEQ ID NO: 35258 - DNA, 42 bp, Emericella nidulans
gaattcactgcggccgccatgcgctctggggttcggctatgg

SEQ ID NO: 35259 - DNA, 41 bp, Emericella nidulans
gttctcgagacgagcgatcgcacgggccacgcaggtcaaag

SEQ ID NO: 35260 - DNA, 53 bp, Emericella nidulans
gaattcactgcggccgccatggtcttcatcaacaacttcaccactatcgatgc

SEQ ID NO: 35261 - DNA, 41 bp, Emericella nidulans
gttctcgagacgagcgatcgcacccccaaggcctgatcgtc

SEQ ID NO: 35262 - DNA, 43 bp, Emericella nidulans
gaattcactgcggccgccatgtccgcccagaatgtagcccatc

SEQ ID NO: 35263 - DNA, 41 bp, Emericella nidulans
gttctcgagacgagcgatcgcgtttcgccgtctgccacggt

SEQ ID NO: 35264 - DNA, 45 bp, Emericella nidulans
gaattcactgcggccgccatgcaagtccatcacgtccctcaaccc

SEQ ID NO: 35265 - DNA, 43 bp, Emericella nidulans
gttctcgagacgagcgatcgctgcccacccaaaagcttgatcg

SEQ ID NO: 35266 - DNA, 47 bp, Emericella nidulans
gaattcactgcggccgccatgtgagccaaacaaagagtggtcaacct

SEQ ID NO: 35267 - DNA, 42 bp, Emericella nidulans
gttctcgagacgagcgatcgccgcacgctcattgcacggata

SEQ ID NO: 35268 - DNA, 51 bp, Emericella nidulans
gaattcactgcggccgccatgcactggacaagcattattctgatgatttct

SEQ ID NO: 35269 - DNA, 50 bp, Emericella nidulans
gttctcgagacgagcgatcgctcgacctaatcaatctttcttctgagctg

SEQ ID NO: 35270 - DNA, 41 bp, Emericella nidulans
gaattcactgcggccgccatgaccgcaaatccgcccagcat

SEQ ID NO: 35271 - DNA, 41 bp, Emericella nidulans
gttctcgagacgagcgatcgctcccaccttcggcctcctcc

SEQ ID NO: 35272 - DNA, 41 bp, Emericella nidulans
gaattcactgcggccgccatgtgccggtcttggagggttgg

SEQ ID NO: 35273 - DNA, 48 bp, Emericella nidulans
gttctcgagacgagcgatcgctcatgacagtgatcgaatggtcgtagc

SEQ ID NO: 35274 - DNA, 42 bp, Emericella nidulans
gaattcactgcggccgccatgcccggccagagttcctcatca

SEQ ID NO: 35275 - DNA, 41 bp, Emericella nidulans
gttctcgagacgagcgatcgcttgcgccggagttccatgtc

SEQ ID NO: 35276 - DNA, 41 bp, Emericella nidulans
gaattcactgcggccgccatgggcggaggggcaaagacgtt

SEQ ID NO: 35277 - DNA, 42 bp, Emericella nidulans
gttctcgagacgagcgatcgcggcaacaccgttgatgcgatg

SEQ ID NO: 35278 - DNA, 43 bp, Emericella nidulans
gaattcactgcggccgccatgtgcgtttctcgcgtacacatcg

SEQ ID NO: 35279 - DNA, 43 bp, Emericella nidulans
gttctcgagacgagcgatcgccacgcagccgttctccttcaga

SEQ ID NO: 35280 - DNA, 41 bp, Emericella nidulans
gaattcactgcggccgccatgcctgagaccgcccagggaca

SEQ ID NO: 35281 - DNA, 41 bp, Emericella nidulans
gttctcgagacgagcgatcgctcgcttccggacatcctccc

SEQ ID NO: 35282 - DNA, 41 bp, Emericella nidulans
gaattcactgcggccgccatgtgcggtgcttgccagaccat

SEQ ID NO: 35283 - DNA, 42 bp, Emericella nidulans
gttctcgagacgagcgatcgctccgcatagtacgccgtagcc

SEQ ID NO: 35284 - DNA, 41 bp, Emericella nidulans
gaattcactgcggccgccatgaggaaaccggcggtgccaat

SEQ ID NO: 35285 - DNA, 42 bp, Emericella nidulans
gttctcgagacgagcgatcgccaggtccggacttcggaggga

SEQ ID NO: 35286 - DNA, 41 bp, Emericella nidulans
gaattcactgcggccgccatggggccgatacgactggagcc

SEQ ID NO: 35287 - DNA, 44 bp, Emericella nidulans
gttctcgagacgagcgatcgcccggacaaggaggaaaccacctg

SEQ ID NO: 35288 - DNA, 41 bp, Emericella nidulans; identical to SEQ ID NO: 34740

SEQ ID NO: 35289 - DNA, 49 bp, Emericella nidulans
gttctcgagacgagcgatcgccgcctttcatactcattacccatatcca

SEQ ID NO: 35290 - DNA, 42 bp, Emericella nidulans; identical to SEQ ID NO: 35274

SEQ ID NO: 35291 - DNA, 42 bp, Emericella nidulans
gttctcgagacgagcgatcgccgcttctcttgcgccggagtt

SEQ ID NO: 35292 - DNA, 44 bp, Emericella nidulans
gaattcactgcggccgccatggacgcacatcattgcatggagga

SEQ ID NO: 35293 - DNA, 48 bp, Emericella nidulans
gttctcgagacgagcgatcgcgccacagtctggtgcataacattagcc

SEQ ID NO: 35294 - DNA, 42 bp, Emericella nidulans
gaattcactgcggccgccatgcatcttgcgattgggccgttt

SEQ ID NO: 35295 - DNA, 41 bp, Emericella nidulans
gttctcgagacgagcgatcgctgcggccctgcatctcctct

SEQ ID NO: 35296 - DNA, 41 bp, Emericella nidulans
gaattcactgcggccgccatgcggtggcaaactccccaagg

SEQ ID NO: 35297 - DNA, 41 bp, Emericella nidulans
gttctcgagacgagcgatcgccgccttggttcgggctcaga

SEQ ID NO: 35298 - DNA, 48 bp, Emericella nidulans
gaattcactgcggccgccatgttaaaaatggttgaaagcgtcctcgac

SEQ ID NO: 35299 - DNA, 42 bp, Emericella nidulans
gttctcgagacgagcgatcgccacccccacaaccccgtaacc

SEQ ID NO: 35300 - DNA, 41 bp, Emericella nidulans
gaattcactgcggccgccatggaactggccaaggggcagga

SEQ ID NO: 35301 - DNA, 42 bp, Emericella nidulans
gttctcgagacgagcgatcgcgacacgaccgattcccgacca

SEQ ID NO: 35302 - DNA, 45 bp, Emericella nidulans
gaattcactgcggccgccatgatgccgggatcaaaatatgccatt

SEQ ID NO: 35303 - DNA, 41 bp, Emericella nidulans
gttctcgagacgagcgatcgcactcgctccggcctcagcac

SEQ ID NO: 35304 - DNA, 44 bp, Emericella nidulans
gaattcactgcggccgccatgtccaaaacctgcactcccagtca

SEQ ID NO: 35305 - DNA, 41 bp, Emericella nidulans
gttctcgagacgagcgatcgccggtcggtcggacttcttcg

SEQ ID NO: 35306 - DNA, 41 bp, Emericella nidulans
gaattcactgcggccgccatggtggaaggaccgcacgcaga

SEQ ID NO: 35307 - DNA, 46 bp, Emericella nidulans
gttctcgagacgagcgatcgcgctgaaagtatgcctgccggactca

SEQ ID NO: 35308 - DNA, 52 bp, Emericella nidulans
gaattcactgcggccgccatgtctctactgctattattgtggcgtttactgc

SEQ ID NO: 35309 - DNA, 41 bp, Emericella nidulans
gttctcgagacgagcgatcgcccggggacgaggtcccattg

SEQ ID NO: 35310 - DNA, 42 bp, Emericella nidulans
gaattcactgcggccgccatggcccgcgaaggtacgttggaa

SEQ ID NO: 35311 - DNA, 47 bp, Emericella nidulans
gttctcgagacgagcgatcgcgcgcacagtatactcacccttcacca

SEQ ID NO: 35312 - DNA, 41 bp, Emericella nidulans; identical to SEQ ID NO: 35282

SEQ ID NO: 35313 - DNA, 54 bp, Emericella nidulans
gttctcgagacgagcgatcgctaaatctttcaatccgcatagtacgccgtagcc

SEQ ID NO: 35314 - DNA, 41 bp, Emericella nidulans
gaattcactgcggccgccatgtggcggccaaatcacggttc

SEQ ID NO: 35315 - DNA, 50 bp, Emericella nidulans
gttctcgagacgagcgatcgctcctaaccctactaactccctcgtaaagc

SEQ ID NO: 35316 - DNA, 41 bp, Emericella nidulans
gaattcactgcggccgccatggccaccatgtccggtgacga

SEQ ID NO: 35317 - DNA, 45 bp, Emericella nidulans
gttctcgagacgagcgatcgcgcgaaagcgagctcgtacgcatag

SEQ ID NO: 35318 - DNA, 41 bp, Emericella nidulans
gaattcactgcggccgccatggctattggccgtcgcgctgt

SEQ ID NO: 35319 - DNA, 41 bp, Emericella nidulans
gttctcgagacgagcgatcgcacaaggcccactgcggcaag

SEQ ID NO: 35320 - DNA, 41 bp, Emericella nidulans
gaattcactgcggccgccatggcgttgctgtggggcttgaa

SEQ ID NO: 35321 - DNA, 44 bp, Emericella nidulans
gttctcgagacgagcgatcgcagcccaacgaggtgagtcaattt

SEQ ID NO: 35322 - DNA, 41 bp, Emericella nidulans
gaattcactgcggccgccatgtccgcaatccagccgctaca

SEQ ID NO: 35323 - DNA, 41 bp, Emericella nidulans
gttctcgagacgagcgatcgcaccctaccggcgctgcaaca

SEQ ID NO: 35324 - DNA, 43 bp, Emericella nidulans
gaattcactgcggccgccatggccagacaaaaagcacggcaga

SEQ ID NO: 35325 - DNA, 41 bp, Emericella nidulans
gttctcgagacgagcgatcgcacgccccgactctccatccc

SEQ ID NO: 35326 - DNA, 41 bp, Emericella nidulans
gaattcactgcggccgccatgccccaaacacgccgcaaaac

SEQ ID NO: 35327 - DNA, 45 bp, Emericella nidulans
gttctcgagacgagcgatcgcccaggtccttttccagagcagtcg

SEQ ID NO: 35328 - DNA, 41 bp, Emericella nidulans
gaattcactgcggccgccatgcccggcccatgctcattacg

SEQ ID NO: 35329 - DNA, 42 bp, Emericella nidulans
gttctcgagacgagcgatcgctccgcggtgtacgagaaacca

SEQ ID NO: 35330 - DNA, 41 bp, Emericella nidulans
gaattcactgcggccgccatgcatcatgcccgccgatcttg

SEQ ID NO: 35331 - DNA, 41 bp, Emericella nidulans
gttctcgagacgagcgatcgcaaaccgcacattccgcacca

SEQ ID NO: 35332 - DNA, 49 bp, Emericella nidulans
gaattcactgcggccgccatgtcgagcagactgttacatttggagaagg

SEQ ID NO: 35333 - DNA, 41 bp, Emericella nidulans
gttctcgagacgagcgatcgcccaccaccgtccaagggacc

SEQ ID NO: 35334 - DNA, 41 bp, Emericella nidulans; identical to SEQ ID NO: 29832

SEQ ID NO: 35335 - DNA, 43 bp, Emericella nidulans
gttctcgagacgagcgatcgcggcccgcttataccacttctcg

SEQ ID NO: 35336 - DNA, 41 bp, Emericella nidulans
gaattcactgcggccgccatgttgatgccgagtcgggccac

SEQ ID NO: 35337 - DNA, 46 bp, Emericella nidulans
gttctcgagacgagcgatcgctggatagatatgctgaagccggtcc

SEQ ID NO: 35338 - DNA, 45 bp, Emericella nidulans
gaattcactgcggccgccatgcgcagtatgaaccaaagcgtcgtg

SEQ ID NO: 35339 - DNA, 41 bp, Emericella nidulans
gttctcgagacgagcgatcgcccagcgaaaggcgcttgcat

SEQ ID NO: 35340 - DNA, 50 bp, Emericella nidulans
gaattcactgcggccgccatgctgactggagctatttctggggtaattca

SEQ ID NO: 35341 - DNA, 41 bp, Emericella nidulans
gttctcgagacgagcgatcgccttcgcgttggcggtcttcg

SEQ ID NO: 35342 - DNA, 41 bp, Emericella nidulans
gaattcactgcggccgccatgcgcgcctgggtccgaaatta

SEQ ID NO: 35343 - DNA, 41 bp, Emericella nidulans
gttctcgagacgagcgatcgcctgcagcgccaaacccatca

SEQ ID NO: 35344 - DNA, 42 bp, Emericella nidulans
gaattcactgcggccgccatgcaccctcaaaagcgccaaccc

SEQ ID NO: 35345 - DNA, 42 bp, Emericella nidulans
gttctcgagacgagcgatcgcccagaccgagcatggccttca

SEQ ID NO: 35346 - DNA, 55 bp, Emericella nidulans
gaattcactgcggccgccatgataaaactcaagtatatcattcagcagcggctat

SEQ ID NO: 35347 - DNA, 41 bp, Emericella nidulans
gttctcgagacgagcgatcgccatgaccgcaggggaggaga

SEQ ID NO: 35348 - DNA, 51 bp, Emericella nidulans
gaattcactgcggccgccatgcttgcaatgtagcaagaactgattgatgga

SEQ ID NO: 35349 - DNA, 41 bp, Emericella nidulans
gttctcgagacgagcgatcgcgggtgaatgcccacgccaac

SEQ ID NO: 35350 - DNA, 41 bp, Emericella nidulans
gaattcactgcggccgccatgcacctgctgggacgccgagt

SEQ ID NO: 35351 - DNA, 41 bp, Emericella nidulans
gttctcgagacgagcgatcgctaaggggcgggttggcgttg

SEQ ID NO: 35352 - DNA, 41 bp, Emericella nidulans
gaattcactgcggccgccatgacgggagaggcaccggcttc

SEQ ID NO: 35353 - DNA, 41 bp, Emericella nidulans
gttctcgagacgagcgatcgctcccgacgctgcctggtgta

SEQ ID NO: 35354 - DNA, 42 bp, Emericella nidulans
gaattcactgcggccgccatgccacgctgcagacgaccttca

SEQ ID NO: 35355 - DNA, 43 bp, Emericella nidulans
gttctcgagacgagcgatcgccgcatccattcgctcatcttga

SEQ ID NO: 35356 - DNA, 41 bp, Emericella nidulans
gaattcactgcggccgccatgtccgtccccgcttcctcaga

SEQ ID NO: 35357 - DNA, 57 bp, Emericella nidulans
gttctcgagacgagcgatcgcaaaaatccgtcagaaaagcccttttacgaaaaacat

SEQ ID NO: 35358 - DNA, 41 bp, Emericella nidulans
gaattcactgcggccgccatgcgcatccagaagagcgtggc

SEQ ID NO: 35359 - DNA, 41 bp, Emericella nidulans
gttctcgagacgagcgatcgccgtcgtcgtcgtcaccagca

SEQ ID NO: 35360 - DNA, 41 bp, Emericella nidulans
gaattcactgcggccgccatgcccgtcaaagcgccagccta

SEQ ID NO: 35361 - DNA, 44 bp, Emericella nidulans
gttctcgagacgagcgatcgcggcatccttgggctggtagttgc

SEQ ID NO: 35362 - DNA, 43 bp, Emericella nidulans
gaattcactgcggccgccatgtccccaagcttgtctggaccgt

SEQ ID NO: 35363 - DNA, 42 bp, Emericella nidulans
gttctcgagacgagcgatcgccgctgtatccgagggcgaggt

SEQ ID NO: 35364 - DNA, 56 bp, Emericella nidulans
gaattcactgcggccgccatgctttttatactaattcaacttatcctgccacagtt

SEQ ID NO: 35365 - DNA, 53 bp, Emericella nidulans
gttctcgagacgagcgatcgccttgtatttattacccccttctagctcgataa

SEQ ID NO: 35366 - DNA, 43 bp, Emericella nidulans
gaattcactgcggccgccatgcgcacccagaccgtatcacagc

SEQ ID NO: 35367 - DNA, 49 bp, Emericella nidulans
gttctcgagacgagcgatcgcattcgtgctgcatagcctctttagcatt

SEQ ID NO: 35368 - DNA, 56 bp, Emericella nidulans; identical to SEQ ID NO: 35364

SEQ ID NO: 35369 - DNA, 53 bp, Emericella nidulans
gttctcgagacgagcgatcgccttgtattcattacccccttctagctcgataa

SEQ ID NO: 35370 - DNA, 49 bp, Emericella nidulans
gaattcactgcggccgccatgataagcatctcaattagcaagccgtggg

SEQ ID NO: 35371 - DNA, 42 bp, Emericella nidulans
gttctcgagacgagcgatcgcgccgagttccagtggcagcct

SEQ ID NO: 35372 - DNA, 41 bp, Emericella nidulans
gaattcactgcggccgccatgtgttcccatacgcggcctga

SEQ ID NO: 35373 - DNA, 45 bp, Emericella nidulans
gttctcgagacgagcgatcgccggatccggtctgcaaatagctca

SEQ ID NO: 35374 - DNA, 42 bp, Emericella nidulans
gaattcactgcggccgccatgtggggatcaaggtccccatcg

SEQ ID NO: 35375 - DNA, 41 bp, Emericella nidulans
gttctcgagacgagcgatcgccagagcatcgaccgcctccc

SEQ ID NO: 35376 - DNA, 43 bp, Emericella nidulans
gaattcactgcggccgccatgcgcgatatcgcgacttgtgtgg

SEQ ID NO: 35377 - DNA, 45 bp, Emericella nidulans
gttctcgagacgagcgatcgcttctctgacacctccatcccactt

SEQ ID NO: 35378 - DNA, 42 bp, Emericella nidulans
gaattcactgcggccgccatgccggttcaaagccggagcttg

SEQ ID NO: 35379 - DNA, 47 bp, Emericella nidulans
gttctcgagacgagcgatcgccgtcttatgactcttccggtgggatg

SEQ ID NO: 35380 - DNA, 42 bp, Emericella nidulans
gaattcactgcggccgccatgcccgttgttgttggcctgggt

SEQ ID NO: 35381 - DNA, 41 bp, Emericella nidulans
gttctcgagacgagcgatcgcctccccactgccctcgacca

SEQ ID NO: 35382 - DNA, 41 bp, Emericella nidulans
gaattcactgcggccgccatgcggctctggcttttggtgcc

SEQ ID NO: 35383 - DNA, 54 bp, Emericella nidulans
gttctcgagacgagcgatcgctatcagtatgaccaggataccaaggatgtttga

SEQ ID NO: 35384 - DNA, 43 bp, Emericella nidulans
gaattcactgcggccgccatgtccacgacctctccgagacaga

SEQ ID NO: 35385 - DNA, 41 bp, Emericella nidulans
gttctcgagacgagcgatcgccctccgctgtgcgtcgctta

SEQ ID NO: 35386 - DNA, 43 bp, Emericella nidulans; identical to SEQ ID NO: 35384

SEQ ID NO: 35387 - DNA, 41 bp, Emericella nidulans; identical to SEQ ID NO: 35385

SEQ ID NO: 35388 - DNA, 43 bp, Emericella nidulans
gaattcactgcggccgccatgccccgacgattactcgcaggct

SEQ ID NO: 35389 - DNA, 52 bp, Emericella nidulans
gttctcgagacgagcgatcgcaaaatcagaaaactcacgatccacctcttca

SEQ ID NO: 35390 - DNA, 41 bp, Emericella nidulans
gaattcactgcggccgccatgggccgagcagacctcctccc

SEQ ID NO: 35391 - DNA, 48 bp, Emericella nidulans
gttctcgagacgagcgatcgccctacattgtatgctctccagatcgaa

SEQ ID NO: 35392 - DNA, 41 bp, Emericella nidulans
gaattcactgcggccgccatggcgggcgtgtcctctccatc

SEQ ID NO: 35393 - DNA, 42 bp, Emericella nidulans
gttctcgagacgagcgatcgccgcaagactgatcggcggttt

SEQ ID NO: 35394 - DNA, 44 bp, Emericella nidulans
gaattcactgcggccgccatgcgaagctgtgaccacagggtgga

SEQ ID NO: 35395 - DNA, 55 bp, Emericella nidulans
gttctcgagacgagcgatcgctgatacctagtacatatcaaatcgatctgggagc

SEQ ID NO: 35396 - DNA, 49 bp, Emericella nidulans
gaattcactgcggccgccatgtgctactgaagaattcatcgggacctgt

SEQ ID NO: 35397 - DNA, 41 bp, Emericella nidulans
gttctcgagacgagcgatcgctgtgtggatgccgccagtga

SEQ ID NO: 35398 - DNA, 42 bp, Emericella nidulans
gaattcactgcggccgccatgtggctgctccccaaggctacc

SEQ ID NO: 35399 - DNA, 53 bp, Emericella nidulans
gttctcgagacgagcgatcgcgggaaggggtagctgtgttattattagcatga

SEQ ID NO: 35400 - DNA, 51 bp, Emericella nidulans
gaattcactgcggccgccatgtggttaaagatacgaagttttacgacatcc

SEQ ID NO: 35401 - DNA, 41 bp, Emericella nidulans
gttctcgagacgagcgatcgccgctcagcgccaggaggaac

SEQ ID NO: 35402 - DNA, 48 bp, Emericella nidulans
gaattcactgcggccgccatgcttgtgttctgccacttcatggtaagc

SEQ ID NO: 35403 - DNA, 42 bp, Emericella nidulans
gttctcgagacgagcgatcgctggtgggacaacccccacgta

SEQ ID NO: 35404 - DNA, 41 bp, Emericella nidulans
gaattcactgcggccgccatgcgcgcgcattagcggatcta

SEQ ID NO: 35405 - DNA, 41 bp, Emericella nidulans
gttctcgagacgagcgatcgccccgtccttaggcgggtggt

SEQ ID NO: 35406 - DNA, 42 bp, Emericella nidulans
gaattcactgcggccgccatgtccggtccggtctgattgtca

SEQ ID NO: 35407 - DNA, 51 bp, Emericella nidulans
gttctcgagacgagcgatcgcacaagagaactaagcaacttcagcgtgctc

SEQ ID NO: 35408 - DNA, 41 bp, Emericella nidulans
gaattcactgcggccgccatggcacggtccagcaggcgaat

SEQ ID NO: 35409 - DNA, 48 bp, Emericella nidulans
gttctcgagacgagcgatcgcccatcgtagaattcatcctcgtcactg

SEQ ID NO: 35410 - DNA, 40 bp, Emericella nidulans
gaattcactgcggccgccatgccgggggtgccgagtcatc

SEQ ID NO: 35411 - DNA, 46 bp, Emericella nidulans
gttctcgagacgagcgatcgctcatcgttttcaaaaagcccgccta

SEQ ID NO: 35412 - DNA, 49 bp, Emericella nidulans
gaattcactgcggccgccatgtgctctcagggatcttgatttttaacca

SEQ ID NO: 35413 - DNA, 49 bp, Emericella nidulans
gttctcgagacgagcgatcgcgtaccgaatctcgtaacttcccgctctg

SEQ ID NO: 35414 - DNA, 41 bp, Emericella nidulans
gaattcactgcggccgccatgcagaacggcaccccctttcc

SEQ ID NO: 35415 - DNA, 52 bp, Emericella nidulans
gttctcgagacgagcgatcgcggtcttctttcagactaacgaaagcaaacga

SEQ ID NO: 35416 - DNA, 41 bp, Emericella nidulans; identical to SEQ ID NO: 34988

SEQ ID NO: 35417 - DNA, 41 bp, Emericella nidulans
gttctcgagacgagcgatcgcggcaatttggcgcagcatcc

SEQ ID NO: 35418 - DNA, 41 bp, Emericella nidulans
gaattcactgcggccgccatgcggcactgtgggcaacctca

SEQ ID NO: 35419 - DNA, 44 bp, Emericella nidulans
gttctcgagacgagcgatcgcggtgcacggacgtaaggatcgag

SEQ ID NO: 35420 - DNA, 44 bp, Emericella nidulans
gaattcactgcggccgccatgcccgtcaagtccctatcggttgc

SEQ ID NO: 35421 - DNA, 44 bp, Emericella nidulans
gttctcgagacgagcgatcgcgccggaggaagaaaagaggcaaa

SEQ ID NO: 35422 - DNA, 44 bp, Emericella nidulans
gaattcactgcggccgccatgggcaggggtcctaagtcctacgc

SEQ ID NO: 35423 - DNA, 42 bp, Emericella nidulans
gttctcgagacgagcgatcgcccctccttcgctcccaaacca

SEQ ID NO: 35424 - DNA, 41 bp, Emericella nidulans
gaattcactgcggccgccatggtccgccccgggaaaggtta

SEQ ID NO: 35425 - DNA, 55 bp, Emericella nidulans
gttctcgagacgagcgatcgctaaataatatgggcgcaaatggtagtataagggt

SEQ ID NO: 35426 - DNA, 48 bp, Emericella nidulans
gaattcactgcggccgccatgtgatctggagcagagattgaagaatca

SEQ ID NO: 35427 - DNA, 41 bp, Emericella nidulans
gttctcgagacgagcgatcgctccgtgcgcctcgacaacac

SEQ ID NO: 35428 - DNA, 44 bp, Emericella nidulans
gaattcactgcggccgccatgttcgtatcatcatgggccttcaa

SEQ ID NO: 35429 - DNA, 51 bp, Emericella nidulans
gttctcgagacgagcgatcgctttttagaaaaactcagaaagtgcgggaaa

SEQ ID NO: 35430 - DNA, 42 bp, Emericella nidulans
gaattcactgcggccgccatgcgcaggttgaaggagcgtgga

SEQ ID NO: 35431 - DNA, 52 bp, Emericella nidulans
gttctcgagacgagcgatcgcctatgaagcaatcaaatgctcaaacagagcc

SEQ ID NO: 35432 - DNA, 41 bp, Emericella nidulans
gaattcactgcggccgccatgccgctgccgccgaaattgta

SEQ ID NO: 35433 - DNA, 42 bp, Emericella nidulans
gttctcgagacgagcgatcgcgcggttcggattcgtccttga

SEQ ID NO: 35434 - DNA, 47 bp, Emericella nidulans
gaattcactgcggccgccatggcctggtttggtactctacggtgacg

SEQ ID NO: 35435 - DNA, 43 bp, Emericella nidulans
gttctcgagacgagcgatcgcgccccagatagcccagaaccaa

SEQ ID NO: 35436 - DNA, 41 bp, Emericella nidulans
gaattcactgcggccgccatgacgccgaagaagccgtgcag

SEQ ID NO: 35437 - DNA, 41 bp, Emericella nidulans
gttctcgagacgagcgatcgcaatctgtcgcgcccgcatct

SEQ ID NO: 35438 - DNA, 40 bp, Emericella nidulans
gaattcactgcggccgccatgaccccctccctcgcagcag

SEQ ID NO: 35439 - DNA, 42 bp, Emericella nidulans
gttctcgagacgagcgatcgctcaaagcacgatcccacctcc

SEQ ID NO: 35440 - DNA, 40 bp, Emericella nidulans
gaattcactgcggccgccatgccgccctggtggccatgta

SEQ ID NO: 35441 - DNA, 41 bp, Emericella nidulans
gttctcgagacgagcgatcgcccgcatcatcagcggtggtt

SEQ ID NO: 35442 - DNA, 41 bp, Emericella nidulans
gaattcactgcggccgccatgggagaccgcaccatcgctga

SEQ ID NO: 35443 - DNA, 41 bp, Emericella nidulans
gttctcgagacgagcgatcgcccccggctttgcgtctgtgt

SEQ ID NO: 35444 - DNA, 44 bp, Emericella nidulans
gaattcactgcggccgccatgatgccatccgaaaaacaacatca

SEQ ID NO: 35445 - DNA, 41 bp, Emericella nidulans
gttctcgagacgagcgatcgccgccgtcgcaactgtcagga

SEQ ID NO: 35446 - DNA, 41 bp, Emericella nidulans
gaattcactgcggccgccatgatgcggcgtctttgcctggt

SEQ ID NO: 35447 - DNA, 49 bp, Emericella nidulans
gttctcgagacgagcgatcgccggatgtgtgggtttattgttatgttgg

SEQ ID NO: 35448 - DNA, 49 bp, Emericella nidulans
gaattcactgcggccgccatgtcatttttgaagctatccagatcgcaaa

SEQ ID NO: 35449 - DNA, 50 bp, Emericella nidulans
gttctcgagacgagcgatcgccttgtactcattacccccatcatgttgta

SEQ ID NO: 35450 - DNA, 49 bp, Emericella nidulans
gaattcactgcggccgccatgatgtctcaggccttcagtgatatgttgc

SEQ ID NO: 35451 - DNA, 41 bp, Emericella nidulans
gttctcgagacgagcgatcgcaggccgcagcacgcttcttg

SEQ ID NO: 35452 - DNA, 41 bp, Emericella nidulans
gaattcactgcggccgccatggcgcctggagcagttgcttg

SEQ ID NO: 35453 - DNA, 41 bp, Emericella nidulans
gttctcgagacgagcgatcgcatgccatcacggccgagtcc

SEQ ID NO: 35454 - DNA, 41 bp, Emericella nidulans; identical to SEQ ID NO: 35318

SEQ ID NO: 35455 - DNA, 49 bp, Emericella nidulans
gttctcgagacgagcgatcgcaacttccgcagtattcttctccttctcc

SEQ ID NO: 35456 - DNA, 41 bp, Emericella nidulans
gaattcactgcggccgccatgtggaggatcgcccagagtgg

SEQ ID NO: 35457 - DNA, 41 bp, Emericella nidulans
gttctcgagacgagcgatcgcttccggaggggctgccaaat

SEQ ID NO: 35458 - DNA, 41 bp, Emericella nidulans; identical to SEQ ID NO: 35456

SEQ ID NO: 35459 - DNA, 41 bp, Emericella nidulans; identical to SEQ ID NO: 35457

SEQ ID NO: 35460 - DNA, 48 bp, Emericella nidulans
gaattcactgcggccgccatgcaatccctaatcccgcttaacaatagg

SEQ ID NO: 35461 - DNA, 41 bp, Emericella nidulans
gttctcgagacgagcgatcgccatggcacatcccgctgcaa

SEQ ID NO: 35462 - DNA, 41 bp, Emericella nidulans
gaattcactgcggccgccatgcgtctcgccacctcgcgatt

SEQ ID NO: 35463 - DNA, 55 bp, Emericella nidulans
gttctcgagacgagcgatcgccatgtttgtctatgatagctctaagttctgatgc

SEQ ID NO: 35464 - DNA, 55 bp, Emericella nidulans
gaattcactgcggccgccatggtgcagagcgaacggtaagttatataccatagat

SEQ ID NO: 35465 - DNA, 47 bp, Emericella nidulans
gttctcgagacgagcgatcgctcccagacaaccaccttcttcttcca

SEQ ID NO: 35466 - DNA, 48 bp, Emericella nidulans
gaattcactgcggccgccatgccggactccatactgtctccagtctca

SEQ ID NO: 35467 - DNA, 42 bp, Emericella nidulans
gttctcgagacgagcgatcgctcaactcatctgcccgcctga

SEQ ID NO: 35468 - DNA, 41 bp, Emericella nidulans
gaattcactgcggccgccatgacgccccttgcacgaaccct

SEQ ID NO: 35469 - DNA, 55 bp, Emericella nidulans
gttctcgagacgagcgatcgctgggatgatagtcatgactttatacagcttaccc

SEQ ID NO: 35470 - DNA, 43 bp, Emericella nidulans
gaattcactgcggccgccatggggatctcgcagctcaaagcct

SEQ ID NO: 35471 - DNA, 44 bp, Emericella nidulans
gttctcgagacgagcgatcgcgcttgccatagaacggaactccc

SEQ ID NO: 35472 - DNA, 41 bp, Emericella nidulans
gaattcactgcggccgccatgcggaatcccgacgtcgttgc

SEQ ID NO: 35473 - DNA, 56 bp, Emericella nidulans
gttctcgagacgagcgatcgcgaggatagaggatattgaacttagtcgagcgggtg

SEQ ID NO: 35474 - DNA, 41 bp, Emericella nidulans
gaattcactgcggccgccatgctgccgcctccagggagaaa

SEQ ID NO: 35475 - DNA, 48 bp, Emericella nidulans
gttctcgagacgagcgatcgccggaaacaaagataccagccataccca

SEQ ID NO: 35476 - DNA, 41 bp, Emericella nidulans
gaattcactgcggccgccatgcggcctcatcgtggtcagca

SEQ ID NO: 35477 - DNA, 54 bp, Emericella nidulans
gttctcgagacgagcgatcgctctatactatagcttattccctcgtcccaaccc

SEQ ID NO: 35478 - DNA, 43 bp, Emericella nidulans
gaattcactgcggccgccatggccgcaagacgtctacggggat

SEQ ID NO: 35479 - DNA, 48 bp, Emericella nidulans
gttctcgagacgagcgatcgccacagcaatgatatccttcttgtggat

SEQ ID NO: 35480 - DNA, 53 bp, Emericella nidulans
gaattcactgcggccgccatgtaaagatgctgttatgtgtatttcggcgaatc

SEQ ID NO: 35481 - DNA, 43 bp, Emericella nidulans
gttctcgagacgagcgatcgcgcttcttgcttggtcccgcagt

SEQ ID NO: 35482 - DNA, 48 bp, Emericella nidulans
gaattcactgcggccgccatgtgatcgtactcctaagtaccggcagga

SEQ ID NO: 35483 - DNA, 41 bp, Emericella nidulans
gttctcgagacgagcgatcgcaggcattcgcgctggcagac

SEQ ID NO: 35484 - DNA, 42 bp, Emericella nidulans
gaattcactgcggccgccatgggctagcaaggccaggcaaca

SEQ ID NO: 35485 - DNA, 42 bp, Emericella nidulans
gttctcgagacgagcgatcgctcaaggcccagtgccttctcc

SEQ ID NO: 35486 - DNA, 41 bp, Emericella nidulans
gaattcactgcggccgccatgatgcaacccggccctaaccc

SEQ ID NO: 35487 - DNA, 42 bp, Emericella nidulans
gttctcgagacgagcgatcgcccaattgcacactggcgcata

SEQ ID NO: 35488 - DNA, 51 bp, Emericella nidulans
gaattcactgcggccgccatgcccctcttgagctgaacagctactaaatcc

SEQ ID NO: 35489 - DNA, 45 bp, Emericella nidulans
gttctcgagacgagcgatcgcggttagcttgccaacaccgtcgat

SEQ ID NO: 35490 - DNA, 41 bp, Emericella nidulans
gaattcactgcggccgccatgtcggctgcaaagccaacggt

SEQ ID NO: 35491 - DNA, 44 bp, Emericella nidulans; identical to SEQ ID NO: 35421

SEQ ID NO: 35492 - DNA, 41 bp, Emericella nidulans
gaattcactgcggccgccatgggcagactgcgcgacgaaga

SEQ ID NO: 35493 - DNA, 42 bp, Emericella nidulans
gttctcgagacgagcgatcgcggcgttgccatccagtttcca

SEQ ID NO: 35494 - DNA, 49 bp, Emericella nidulans
gaattcactgcggccgccatgcgagtctccgaatactggaaaagtgagc

SEQ ID NO: 35495 - DNA, 41 bp, Emericella nidulans
gttctcgagacgagcgatcgccggcggcggtgttgttttgt

SEQ ID NO: 35496 - DNA, 53 bp, Emericella nidulans; identical to SEQ ID NO: 35480

SEQ ID NO: 35497 - DNA, 41 bp, Emericella nidulans
gttctcgagacgagcgatcgccccgccgagcttcttgcttg

SEQ ID NO: 35498 - DNA, 53 bp, Emericella nidulans
gaattcactgcggccgccatgcattctccaaggtataaagttgggacaagtca

SEQ ID NO: 35499 - DNA, 41 bp, Emericella nidulans
gttctcgagacgagcgatcgcccaagcccatggctcgctgt

SEQ ID NO: 35500 - DNA, 41 bp, Emericella nidulans
gaattcactgcggccgccatgcgatggcatcggcggttttc

SEQ ID NO: 35501 - DNA, 42 bp, Emericella nidulans
gttctcgagacgagcgatcgcccgccgccgaactgctttatc

SEQ ID NO: 35502 - DNA, 41 bp, Emericella nidulans
gaattcactgcggccgccatggcgcaaccgcagaaaccaaa

SEQ ID NO: 35503 - DNA, 41 bp, Emericella nidulans
gttctcgagacgagcgatcgctgccgtcgccttctgctcct

SEQ ID NO: 35504 - DNA, 43 bp, Emericella nidulans
gaattcactgcggccgccatgggcaccgctcggtgtgatacat

SEQ ID NO: 35505 - DNA, 52 bp, Emericella nidulans
gttctcgagacgagcgatcgcctatttttccagtgtcaagatgaaagaagca

SEQ ID NO: 35506 - DNA, 44 bp, Emericella nidulans
gaattcactgcggccgccatgtggaatggattctgcgagctgga

SEQ ID NO: 35507 - DNA, 54 bp, Emericella nidulans
gttctcgagacgagcgatcgcgcacaactgtaagtagagtatcttccaatcagg

SEQ ID NO: 35508 - DNA, 42 bp, Emericella nidulans
gaattcactgcggccgccatgtcccgtacttgtgcgggttcg

SEQ ID NO: 35509 - DNA, 45 bp, Emericella nidulans
gttctcgagacgagcgatcgctcgaggcctaggcctgggattatg

SEQ ID NO: 35510 - DNA, 44 bp, Emericella nidulans
gaattcactgcggccgccatgggtctgggagagatggccacttg

SEQ ID NO: 35511 - DNA, 52 bp, Emericella nidulans
gttctcgagacgagcgatcgcgaacagccacgagacaaaagtcttgtagaac

SEQ ID NO: 35512 - DNA, 47 bp, Emericella nidulans
gaattcactgcggccgccatgcctatcagagaggatgcggtctttgg

SEQ ID NO: 35513 - DNA, 43 bp, Emericella nidulans
gttctcgagacgagcgatcgccttgaacccccggaggcgttat

SEQ ID NO: 35514 - DNA, 49 bp, Emericella nidulans
gaattcactgcggccgccatgtttttgtcctcttaccgatacccaagca

SEQ ID NO: 35515 - DNA, 42 bp, Emericella nidulans
gttctcgagacgagcgatcgcccctcctctcagcctgcgtca

SEQ ID NO: 35516 - DNA, 46 bp, Emericella nidulans
gaattcactgcggccgccatgatcccgtcctcaatctgcccgcact

SEQ ID NO: 35517 - DNA, 41 bp, Emericella nidulans
gttctcgagacgagcgatcgcatccggcgggggtacctgtc

SEQ ID NO: 35518 - DNA, 41 bp, Emericella nidulans
gaattcactgcggccgccatggattgcaaaccgcggcgaga

SEQ ID NO: 35519 - DNA, 41 bp, Emericella nidulans
gttctcgagacgagcgatcgcggccaggtgacgcagagcaa

SEQ ID NO: 35520 - DNA, 44 bp, Emericella nidulans
gaattcactgcggccgccatgtcacacctcaatttgcccccaga

SEQ ID NO: 35521 - DNA, 41 bp, Emericella nidulans
gttctcgagacgagcgatcgctcccgcaactcatgccgatg

SEQ ID NO: 35522 - DNA, 45 bp, Emericella nidulans
gaattcactgcggccgccatgcccctgaggaagaggatcctacgg

SEQ ID NO: 35523 - DNA, 51 bp, Emericella nidulans
gttctcgagacgagcgatcgcgcactcgtagtagatataaagccggacgag

SEQ ID NO: 35524 - DNA, 41 bp, Emericella nidulans
gaattcactgcggccgccatgtcgcagtgctcgacggagga

SEQ ID NO: 35525 - DNA, 41 bp, Emericella nidulans
gttctcgagacgagcgatcgcagcgcgcgtgctccttgttc

SEQ ID NO: 35526 - DNA, 48 bp, Emericella nidulans
gaattcactgcggccgccatggcattgcctattcataaggcaaaagga

SEQ ID NO: 35527 - DNA, 52 bp, Emericella nidulans
gttctcgagacgagcgatcgcgggtcgtctccagaattttaagaggagactg

SEQ ID NO: 35528 - DNA, 41 bp, Emericella nidulans
gaattcactgcggccgccatgcggggcgaaacctgatgacc

SEQ ID NO: 35529 - DNA, 44 bp, Emericella nidulans
gttctcgagacgagcgatcgctcagcaagaatcgactcggcaat

SEQ ID NO: 35530 - DNA, 50 bp, Emericella nidulans
gaattcactgcggccgccatgtttttaggaacccatttttgaagccgtgt

SEQ ID NO: 35531 - DNA, 41 bp, Emericella nidulans
gttctcgagacgagcgatcgcttcctcctccctgccgcttc

SEQ ID NO: 35532 - DNA, 42 bp, Emericella nidulans
gaattcactgcggccgccatggccggtaccgcgagaaagacc

SEQ ID NO: 35533 - DNA, 52 bp, Emericella nidulans
gttctcgagacgagcgatcgctcatgtactacttaatcacctctctcgtccc

SEQ ID NO: 35534 - DNA, 41 bp, Emericella nidulans
gaattcactgcggccgccatgggcacccctcgaccggaatc

SEQ ID NO: 35535 - DNA, 47 bp, Emericella nidulans
gttctcgagacgagcgatcgcccaatcaccatccaacaaatcctcca

SEQ ID NO: 35536 - DNA, 41 bp, Emericella nidulans
gaattcactgcggccgccatgatggctaccgttgcggtggg

SEQ ID NO: 35537 - DNA, 41 bp, Emericella nidulans
gttctcgagacgagcgatcgcgggggcatcctcgtcgttga

SEQ ID NO: 35538 - DNA, 41 bp, Emericella nidulans
gaattcactgcggccgccatgcgcttcgccaagcaagagca

SEQ ID NO: 35539 - DNA, 52 bp, Emericella nidulans
gttctcgagacgagcgatcgcgctaactcattcataaaccgactcctagcac

SEQ ID NO: 35540 - DNA, 41 bp, Emericella nidulans
gaattcactgcggccgccatgccgctgcttgttgcagcctc

SEQ ID NO: 35541 - DNA, 42 bp, Emericella nidulans
gttctcgagacgagcgatcgctttacatggcctgggcgagga

SEQ ID NO: 35542 - DNA, 53 bp, Emericella nidulans
gaattcactgcggccgccatgctcatctccatgctgaatatcgaagtacacct

SEQ ID NO: 35543 - DNA, 53 bp, Emericella nidulans
gttctcgagacgagcgatcgcaagcgtatattctatctcacggaagagcttgg

SEQ ID NO: 35544 - DNA, 48 bp, Emericella nidulans
gaattcactgcggccgccatgtgtttcagtcgaatggcagatacagca

SEQ ID NO: 35545 - DNA, 42 bp, Emericella nidulans
gttctcgagacgagcgatcgccatttcgcgtgcgaaggcata

SEQ ID NO: 35546 - DNA, 40 bp, Emericella nidulans
gaattcactgcggccgccatggcccacgctgccagtgcat

SEQ ID NO: 35547 - DNA, 43 bp, Emericella nidulans
gttctcgagacgagcgatcgctccagcagcccatagagaccca

SEQ ID NO: 35548 - DNA, 47 bp, Emericella nidulans
gaattcactgcggccgccatgggacttggcaaatctgttttcgagca

SEQ ID NO: 35549 - DNA, 42 bp, Emericella nidulans
gttctcgagacgagcgatcgcgcgcatcacctcccgggtact

SEQ ID NO: 35550 - DNA, 41 bp, Emericella nidulans
gaattcactgcggccgccatgctccgcgagagccgcagttg

SEQ ID NO: 35551 - DNA, 46 bp, Emericella nidulans
gttctcgagacgagcgatcgcccgtcggcgatattctgaacacttg

SEQ ID NO: 35552 - DNA, 42 bp, Emericella nidulans
gaattcactgcggccgccatgccactgaggcaaccgcaatcg

SEQ ID NO: 35553 - DNA, 49 bp, Emericella nidulans
gttctcgagacgagcgatcgccatcatcggggtagacgtaatgaccttg

SEQ ID NO: 35554 - DNA, 41 bp, Emericella nidulans
gaattcactgcggccgccatgccgagcgacctccccgagat

SEQ ID NO: 35555 - DNA, 41 bp, Emericella nidulans
gttctcgagacgagcgatcgcgcgcggggaagtcggaaact

SEQ ID NO: 35556 - DNA, 56 bp, Emericella nidulans
gaattcactgcggccgccatggagacaaaacagtatgactatatcgtgttaggtgg

SEQ ID NO: 35557 - DNA, 48 bp, Emericella nidulans
gttctcgagacgagcgatcgcacgcaaagtaacaagctcttccgcact

SEQ ID NO: 35558 - DNA, 41 bp, Emericella nidulans
gaattcactgcggccgccatgcggtccggcgaggacatttg

SEQ ID NO: 35559 - DNA, 41 bp, Emericella nidulans
gttctcgagacgagcgatcgcaccgatgacggggttgaggc

SEQ ID NO: 35560 - DNA, 42 bp, Emericella nidulans
gaattcactgcggccgccatgcgactgggacggagaggacga

SEQ ID NO: 35561 - DNA, 41 bp, Emericella nidulans
gttctcgagacgagcgatcgcagaggccccggaacgaatgc

SEQ ID NO: 35562 - DNA, 42 bp, Emericella nidulans
gaattcactgcggccgccatgtggcgaataaacctgctgcaa

SEQ ID NO: 35563 - DNA, 41 bp, Emericella nidulans
gttctcgagacgagcgatcgctcgcaactgcaaccgccttc

SEQ ID NO: 35564 - DNA, 51 bp, Emericella nidulans
gaattcactgcggccgccatgaggatcgtatatgagacatttgggctaggg

SEQ ID NO: 35565 - DNA, 57 bp, Emericella nidulans
gttctcgagacgagcgatcgcaggctgacattaccagactacaaaagtcaccgcaac

SEQ ID NO: 35566 - DNA, 53 bp, Emericella nidulans
gaattcactgcggccgccatgtacaagtaaccaaataacaccatgtccaaccc

SEQ ID NO: 35567 - DNA, 44 bp, Emericella nidulans
gttctcgagacgagcgatcgcgggcaggaagaacaaccccctta

SEQ ID NO: 35568 - DNA, 53 bp, Emericella nidulans; identical to SEQ ID NO: 35566

SEQ ID NO: 35569 - DNA, 44 bp, Emericella nidulans; identical to SEQ ID NO: 35567

SEQ ID NO: 35570 - DNA, 41 bp, Emericella nidulans
gaattcactgcggccgccatgggcggtgcggtcgttatccc

SEQ ID NO: 35571 - DNA, 41 bp, Emericella nidulans; identical to SEQ ID NO: 35213

SEQ ID NO: 35572 - DNA, 41 bp, Emericella nidulans
gaattcactgcggccgccatgcggcgcccgtgtcgatttta

SEQ ID NO: 35573 - DNA, 46 bp, Emericella nidulans
gttctcgagacgagcgatcgctccaggaaatccaatatgccaagca

SEQ ID NO: 35574 - DNA, 41 bp, Emericella nidulans
gaattcactgcggccgccatggttccgcgcacagcagaacg

SEQ ID NO: 35575 - DNA, 47 bp, Emericella nidulans
gttctcgagacgagcgatcgccgcctccaagagagattcatagtccc

SEQ ID NO: 35576 - DNA, 46 bp, Emericella nidulans
gaattcactgcggccgccatgcaatgcggagctaacgttgtttgtg

SEQ ID NO: 35577 - DNA, 55 bp, Emericella nidulans
gttctcgagacgagcgatcgcatatcttttcaactcagttcttacctgttgaatg

SEQ ID NO: 35578 - DNA, 41 bp, Emericella nidulans
gaattcactgcggccgccatgcgctgcgcaaagaccacgaa

SEQ ID NO: 35579 - DNA, 45 bp, Emericella nidulans
gttctcgagacgagcgatcgctgagaggggacggttgtatattgc

SEQ ID NO: 35580 - DNA, 52 bp, Emericella nidulans
gaattcactgcggccgccatgattccaacttctaaaaaccacctcaggcaac

SEQ ID NO: 35581 - DNA, 40 bp, Emericella nidulans
gttctcgagacgagcgatcgccggcctgctcagcgtgctc

SEQ ID NO: 35582 - DNA, 41 bp, Emericella nidulans
gaattcactgcggccgccatgggccgaattccaggaccaca

SEQ ID NO: 35583 - DNA, 41 bp, Emericella nidulans
gttctcgagacgagcgatcgcccgttgccgccagccttctt

SEQ ID NO: 35584 - DNA, 42 bp, Emericella nidulans
gaattcactgcggccgccatgcgacgatcttgagcgcgagga

SEQ ID NO: 35585 - DNA, 52 bp, Emericella nidulans
gttctcgagacgagcgatcgcagatacccatgttcgtatccttcttctttgc

SEQ ID NO: 35586 - DNA, 45 bp, Emericella nidulans
gaattcactgcggccgccatgtgaccaaacagcgtttgaacaaga

SEQ ID NO: 35587 - DNA, 44 bp, Emericella nidulans
gttctcgagacgagcgatcgcaaacgctccctaagccatcctcc

SEQ ID NO: 35588 - DNA, 41 bp, Emericella nidulans
gaattcactgcggccgccatgctgcccccaatgggcacaaa

SEQ ID NO: 35589 - DNA, 43 bp, Emericella nidulans
gttctcgagacgagcgatcgccgtgcacagccttgatttgggt

SEQ ID NO: 35590 - DNA, 41 bp, Emericella nidulans
gaattcactgcggccgccatgggctggcacgcagatgggta

SEQ ID NO: 35591 - DNA, 41 bp, Emericella nidulans
gttctcgagacgagcgatcgctcgccggtgatctcctcgta

SEQ ID NO: 35592 - DNA, 57 bp, Emericella nidulans
gaattcactgcggccgccatggccgatctagatgaaattgtcgataagattgtcagt

SEQ ID NO: 35593 - DNA, 45 bp, Emericella nidulans
gttctcgagacgagcgatcgccggtcaagaattcattggcgttca

SEQ ID NO: 35594 - DNA, 42 bp, Emericella nidulans
gaattcactgcggccgccatgggagctggctcacaggccatc

SEQ ID NO: 35595 - DNA, 41 bp, Emericella nidulans
gttctcgagacgagcgatcgccccatcggccggatgtgttc

SEQ ID NO: 35596 - DNA, 45 bp, Emericella nidulans
gaattcactgcggccgccatgcgacgactatcgctcgaatggtga

SEQ ID NO: 35597 - DNA, 51 bp, Emericella nidulans
gttctcgagacgagcgatcgcggtcgatgaagattagattgcttttgttcg

SEQ ID NO: 35598 - DNA, 42 bp, Emericella nidulans
gaattcactgcggccgccatgcgccgagcagtatccgattgc

SEQ ID NO: 35599 - DNA, 48 bp, Emericella nidulans
gttctcgagacgagcgatcgcgcatacttagtccgagtggccttctca

SEQ ID NO: 35600 - DNA, 41 bp, Emericella nidulans
gaattcactgcggccgccatggtgtccgacgcctgcggtct

SEQ ID NO: 35601 - DNA, 42 bp, Emericella nidulans
gttctcgagacgagcgatcgccccagtgttggagcccacgtc

SEQ ID NO: 35602 - DNA, 47 bp, Emericella nidulans
gaattcactgcggccgccatgtagtatcaagctggcgaatgatgtga

SEQ ID NO: 35603 - DNA, 44 bp, Emericella nidulans
gttctcgagacgagcgatcgcccactggaatcgcgtcagacctc

SEQ ID NO: 35604 - DNA, 41 bp, Emericella nidulans
gaattcactgcggccgccatgtttgccgctgctagggtgcc

SEQ ID NO: 35605 - DNA, 45 bp, Emericella nidulans
gttctcgagacgagcgatcgcggcgtatacaccttaaacgggtgc

SEQ ID NO: 35606 - DNA, 52 bp, Emericella nidulans
gaattcactgcggccgccatgccagagagcatatctggtattgcaactcttc

SEQ ID NO: 35607 - DNA, 41 bp, Emericella nidulans
gttctcgagacgagcgatcgcccgccacgctgtctgctgaa

SEQ ID NO: 35608 - DNA, 43 bp, Emericella nidulans
gaattcactgcggccgccatgcccggcggctctagagatcgtt

SEQ ID NO: 35609 - DNA, 41 bp, Emericella nidulans
gttctcgagacgagcgatcgcgtcgggtcgcgggtcaggat

SEQ ID NO: 35610 - DNA, 41 bp, Emericella nidulans
gaattcactgcggccgccatgttcgggagaggcaccgcaag

SEQ ID NO: 35611 - DNA, 44 bp, Emericella nidulans
gttctcgagacgagcgatcgcgccatcattatccagcgccatga

SEQ ID NO: 35612 - DNA, 40 bp, Emericella nidulans
gaattcactgcggccgccatgcggcgcaaacggcgtgaag

SEQ ID NO: 35613 - DNA, 41 bp, Emericella nidulans
gttctcgagacgagcgatcgcggctggcgtgcatcgcttct

SEQ ID NO: 35614 - DNA, 43 bp, Emericella nidulans
gaattcactgcggccgccatgtcgcagcgtaaccactttccct

SEQ ID NO: 35615 - DNA, 44 bp, Emericella nidulans
gttctcgagacgagcgatcgcgcgcgctctgtatttcggtttcg

SEQ ID NO: 35616 - DNA, 41 bp, Emericella nidulans
gaattcactgcggccgccatgtggtagcgttgcgccttacc

SEQ ID NO: 35617 - DNA, 46 bp, Emericella nidulans
gttctcgagacgagcgatcgccagccttcttggcttcatgatctgg

SEQ ID NO: 35618 - DNA, 41 bp, Emericella nidulans
gaattcactgcggccgccatgtgccatgagcgcactgaacg

SEQ ID NO: 35619 - DNA, 43 bp, Emericella nidulans
gttctcgagacgagcgatcgctgcgttcttctcgtccactcca

SEQ ID NO: 35620 - DNA, 41 bp, Emericella nidulans
gaattcactgcggccgccatgccctcgcctggcaagccttc

SEQ ID NO: 35621 - DNA, 50 bp, Emericella nidulans
gttctcgagacgagcgatcgcttcttcttcttctttttaccgtccgtgtc

SEQ ID NO: 35622 - DNA, 42 bp, Emericella nidulans
gaattcactgcggccgccatgcatactgcgctgccccaggtg

SEQ ID NO: 35623 - DNA, 41 bp, Emericella nidulans
gttctcgagacgagcgatcgctcccacgcgaggaggaatcg

SEQ ID NO: 35624 - DNA, 48 bp, Emericella nidulans
gaattcactgcggccgccatggtgtacatccggcaacatgaattatcg

SEQ ID NO: 35625 - DNA, 44 bp, Emericella nidulans
gttctcgagacgagcgatcgccctctggcacataggggtgcttg

SEQ ID NO: 35626 - DNA, 46 bp, Emericella nidulans
gaattcactgcggccgccatgtggaaggtctctggcacaaacaacg

SEQ ID NO: 35627 - DNA, 41 bp, Emericella nidulans
gttctcgagacgagcgatcgcccacaatcgcggcagatcca

SEQ ID NO: 35628 - DNA, 41 bp, Emericella nidulans
gaattcactgcggccgccatgcgcggaggtgtcgcgaagtt

SEQ ID NO: 35629 - DNA, 52 bp, Emericella nidulans
gttctcgagacgagcgatcgcctttgctaagaacgcttggaaagccttatgc

SEQ ID NO: 35630 - DNA, 50 bp, Emericella nidulans
gaattcactgcggccgccatggtggaacaacggcataaattcagagatgg

SEQ ID NO: 35631 - DNA, 54 bp, Emericella nidulans
gttctcgagacgagcgatcgcgtagaatgtttgagagttggagaaagcagagga

SEQ ID NO: 35632 - DNA, 49 bp, Emericella nidulans
gaattcactgcggccgccatgatgccaccaaaagcacataaaacaaagc

SEQ ID NO: 35633 - DNA, 46 bp, Emericella nidulans
gttctcgagacgagcgatcgctccgaagttggaagggtactggagc

SEQ ID NO: 35634 - DNA, 43 bp, Emericella nidulans
gaattcactgcggccgccatgtccctgggtgaatcaacgacga

SEQ ID NO: 35635 - DNA, 46 bp, Emericella nidulans
gttctcgagacgagcgatcgccccactctgcctgagttagatggaa

SEQ ID NO: 35636 - DNA, 42 bp, Emericella nidulans
gaattcactgcggccgccatggcgcgtctgcagcaggagatt

SEQ ID NO: 35637 - DNA, 50 bp, Emericella nidulans
gttctcgagacgagcgatcgcgttcctccatatccgaatagccttatctt

SEQ ID NO: 35638 - DNA, 43 bp, Emericella nidulans
gaattcactgcggccgccatgggcctgtccggtcatgtttcca

SEQ ID NO: 35639 - DNA, 43 bp, Emericella nidulans
gttctcgagacgagcgatcgcaagcacgtatcggaatcgagga

SEQ ID NO: 35640 - DNA, 45 bp, Emericella nidulans
gaattcactgcggccgccatgcaccgcctttgaagatggctttca

SEQ ID NO: 35641 - DNA, 41 bp, Emericella nidulans
gttctcgagacgagcgatcgctgcagtggttggtgggtggg

SEQ ID NO: 35642 - DNA, 50 bp, Emericella nidulans
gaattcactgcggccgccatgcgtgtacagcactatattcggaacgaacg

SEQ ID NO: 35643 - DNA, 50 bp, Emericella nidulans
gttctcgagacgagcgatcgcgtagaagacgaaggtagcgtcaccggaca

SEQ ID NO: 35644 - DNA, 42 bp, Emericella nidulans
gaattcactgcggccgccatgggaccttcgggagggctgctt

SEQ ID NO: 35645 - DNA, 47 bp, Emericella nidulans
gttctcgagacgagcgatcgccttgtcagcctcagaaagttcgtcca

SEQ ID NO: 35646 - DNA, 53 bp, Emericella nidulans
gaattcactgcggccgccatggtttccctagagtcaaactctgcttaagtcgt

SEQ ID NO: 35647 - DNA, 42 bp, Emericella nidulans
gttctcgagacgagcgatcgctgccaccgacttccagggaca

SEQ ID NO: 35648 - DNA, 41 bp, Emericella nidulans
gaattcactgcggccgccatgtgtccaggggttcgccgtta

SEQ ID NO: 35649 - DNA, 43 bp, Emericella nidulans
gttctcgagacgagcgatcgctgcatccctccgtgtgatttcg

SEQ ID NO: 35650 - DNA, 41 bp, Emericella nidulans
gaattcactgcggccgccatgccctctctgaaccccgcaca

SEQ ID NO: 35651 - DNA, 53 bp, Emericella nidulans
gttctcgagacgagcgatcgcacaaaacaaggctatctaaactcgaaaatccc

SEQ ID NO: 35652 - DNA, 41 bp, Emericella nidulans
gaattcactgcggccgccatgtgacccactggcggtggaga

SEQ ID NO: 35653 - DNA, 44 bp, Emericella nidulans
gttctcgagacgagcgatcgcagcatcggcggatgtaatagtcc

SEQ ID NO: 35654 - DNA, 41 bp, Emericella nidulans
gaattcactgcggccgccatggcctggggtcatccctgggt

SEQ ID NO: 35655 - DNA, 42 bp, Emericella nidulans
gttctcgagacgagcgatcgcccggatggaccagaaccctga

SEQ ID NO: 35656 - DNA, 41 bp, Emericella nidulans
gaattcactgcggccgccatgtcccggcgcctagcgtacaa

SEQ ID NO: 35657 - DNA, 41 bp, Emericella nidulans
gttctcgagacgagcgatcgcaggcgtttcggctcatgtcc

SEQ ID NO: 35658 - DNA, 41 bp, Emericella nidulans
gaattcactgcggccgccatgggccctccgcagccatacag

SEQ ID NO: 35659 - DNA, 41 bp, Emericella nidulans
gttctcgagacgagcgatcgccggaacccagcatgggaact

SEQ ID NO: 35660 - DNA, 44 bp, Emericella nidulans
gaattcactgcggccgccatgccagccaacaggtatgccaatcg

SEQ ID NO: 35661 - DNA, 43 bp, Emericella nidulans
gttctcgagacgagcgatcgccgctgccagagcgtattcaccc

SEQ ID NO: 35662 - DNA, 48 bp, Emericella nidulans
gaattcactgcggccgccatggaattggagtactccttgcaggcattg

SEQ ID NO: 35663 - DNA, 50 bp, Emericella nidulans
gttctcgagacgagcgatcgctcaccaaccaaaaatttctccaacactga

SEQ ID NO: 35664 - DNA, 46 bp, Emericella nidulans
gaattcactgcggccgccatgtgctttgctgcaaggacataaaccc

SEQ ID NO: 35665 - DNA, 41 bp, Emericella nidulans
gttctcgagacgagcgatcgcccaccgtttcggcccattga

SEQ ID NO: 35666 - DNA, 42 bp, Emericella nidulans
gaattcactgcggccgccatggggataccccctcgcacgttg

SEQ ID NO: 35667 - DNA, 48 bp, Emericella nidulans
gttctcgagacgagcgatcgccggaacgtaggataatcatcccccaag

SEQ ID NO: 35668 - DNA, 45 bp, Emericella nidulans
gaattcactgcggccgccatgtgcttttcatcgcactgggtctcc

SEQ ID NO: 35669 - DNA, 50 bp, Emericella nidulans
gttctcgagacgagcgatcgcatagtcaatagtggaacgcagccatatca

SEQ ID NO: 35670 - DNA, 52 bp, Emericella nidulans
gaattcactgcggccgccatgcaaatatcactgtgatgtgtgctctgtggac

SEQ ID NO: 35671 - DNA, 42 bp, Emericella nidulans
gttctcgagacgagcgatcgcccaaccgctgtgcaccatgaa

SEQ ID NO: 35672 - DNA, 42 bp, Emericella nidulans
gaattcactgcggccgccatgtcagtggcgggaactgcaacc

SEQ ID NO: 35673 - DNA, 40 bp, Emericella nidulans
gttctcgagacgagcgatcgcgcgcgtggcaggcagaatc

SEQ ID NO: 35674 - DNA, 42 bp, Emericella nidulans
gaattcactgcggccgccatgtgccattgcttgctgccgact

SEQ ID NO: 35675 - DNA, 41 bp, Emericella nidulans
gttctcgagacgagcgatcgcgccaagctcacgggtgctca

SEQ ID NO: 35676 - DNA, 50 bp, Emericella nidulans
gaattcactgcggccgccatgatctgcagaaattgtgactttacgtggtg

SEQ ID NO: 35677 - DNA, 43 bp, Emericella nidulans
gttctcgagacgagcgatcgccggcgttgcagatgatttctcg

SEQ ID NO: 35678 - DNA, 43 bp, Emericella nidulans
gaattcactgcggccgccatggaacaagcgagacgagcgagcc

SEQ ID NO: 35679 - DNA, 41 bp, Emericella nidulans
gttctcgagacgagcgatcgctcgcggcataatcggccatc

SEQ ID NO: 35680 - DNA, 41 bp, Emericella nidulans
gaattcactgcggccgccatgtccgcgcgtcgatatcctca

SEQ ID NO: 35681 - DNA, 43 bp, Emericella nidulans
gttctcgagacgagcgatcgcggctcgcagtgaaattgctcgt

SEQ ID NO: 35682 - DNA, 41 bp, Emericella nidulans
gaattcactgcggccgccatgcgatcgccagttgcggcttt

SEQ ID NO: 35683 - DNA, 41 bp, Emericella nidulans
gttctcgagacgagcgatcgcatggcgctgctgctgcgaac

SEQ ID NO: 35684 - DNA, 43 bp, Emericella nidulans
gaattcactgcggccgccatgtgccccgagttcgcgttagttc

SEQ ID NO: 35685 - DNA, 57 bp, Emericella nidulans
gttctcgagacgagcgatcgctttatttggacaagcatttcttctatgcccaattct

SEQ ID NO: 35686 - DNA, 43 bp, Emericella nidulans; identical to SEQ ID NO: 35684

SEQ ID NO: 35687 - DNA, 57 bp, Emericella nidulans; identical to SEQ ID NO: 35685

SEQ ID NO: 35688 - DNA, 45 bp, Emericella nidulans
gaattcactgcggccgccatgtggtttcttggtttgggcattggt

SEQ ID NO: 35689 - DNA, 43 bp, Emericella nidulans
gttctcgagacgagcgatcgctccaagaacgctgtggctccaa

SEQ ID NO: 35690 - DNA, 50 bp, Emericella nidulans
gaattcactgcggccgccatgtcaccctctccctttagttagagcatccc

SEQ ID NO: 35691 - DNA, 43 bp, Emericella nidulans
gttctcgagacgagcgatcgctgccaactctggttgcggctta

SEQ ID NO: 35692 - DNA, 49 bp, Emericella nidulans
gaattcactgcggccgccatggaaaatctaccgatcacctttccccaac

SEQ ID NO: 35693 - DNA, 42 bp, Emericella nidulans
gttctcgagacgagcgatcgcgctgcttcaacacccgcctca

SEQ ID NO: 35694 - DNA, 47 bp, Emericella nidulans
gaattcactgcggccgccatgccactcttcccccactctaccatatt

SEQ ID NO: 35695 - DNA, 44 bp, Emericella nidulans
gttctcgagacgagcgatcgcccagctggttctcggacttgtcg

SEQ ID NO: 35696 - DNA, 47 bp, Emericella nidulans
gaattcactgcggccgccatgggctttgaaatcccaggtatgcttcc

SEQ ID NO: 35697 - DNA, 48 bp, Emericella nidulans
gttctcgagacgagcgatcgctgtttgtttcgcttctcctgtttgagc

SEQ ID NO: 35698 - DNA, 43 bp, Emericella nidulans
gaattcactgcggccgccatgtgggtagcgcaaccatcaatca

SEQ ID NO: 35699 - DNA, 41 bp, Emericella nidulans
gttctcgagacgagcgatcgcgtgccgggccagttgttcgt

SEQ ID NO: 35700 - DNA, 41 bp, Emericella nidulans
gaattcactgcggccgccatgagctgctgggcagacgagcc

SEQ ID NO: 35701 - DNA, 49 bp, Emericella nidulans
gttctcgagacgagcgatcgccctatcggtagttgatcaggcactgagg

SEQ ID NO: 35702 - DNA, 41 bp, Emericella nidulans
gaattcactgcggccgccatgtgcccagctcggtgctgtct

SEQ ID NO: 35703 - DNA, 42 bp, Emericella nidulans
gttctcgagacgagcgatcgcccaagcgcagcctttccgact

SEQ ID NO: 35704 - DNA, 42 bp, Emericella nidulans
gaattcactgcggccgccatggggttcagcggcgtatatgga

SEQ ID NO: 35705 - DNA, 41 bp, Emericella nidulans
gttctcgagacgagcgatcgcgccacagttaggccgctccc

SEQ ID NO: 35706 - DNA, 41 bp, Emericella nidulans
gaattcactgcggccgccatgggggactgcaagcgcgaaaa

SEQ ID NO: 35707 - DNA, 40 bp, Emericella nidulans
gttctcgagacgagcgatcgcctcgccgccgtggtagctc

SEQ ID NO: 35708 - DNA, 42 bp, Emericella nidulans
gaattcactgcggccgccatgtcacccttggcaacagcgaca

SEQ ID NO: 35709 - DNA, 41 bp, Emericella nidulans
gttctcgagacgagcgatcgccgcgatcgggggctattggt

SEQ ID NO: 35710 - DNA, 41 bp, Emericella nidulans
gaattcactgcggccgccatgtgtgtcgccttcagcggtgg

SEQ ID NO: 35711 - DNA, 41 bp, Emericella nidulans
gttctcgagacgagcgatcgcgccagcggcctgcttcatct

SEQ ID NO: 35712 - DNA, 48 bp, Emericella nidulans
gaattcactgcggccgccatgccgtcatctgcaacatactttcaatcg

SEQ ID NO: 35713 - DNA, 55 bp, Emericella nidulans
gttctcgagacgagcgatcgcattctatacaggctctatcaacacctgcataatc

SEQ ID NO: 35714 - DNA, 42 bp, Emericella nidulans
gaattcactgcggccgccatgcgacagaggcccctgtctgga

SEQ ID NO: 35715 - DNA, 41 bp, Emericella nidulans
gttctcgagacgagcgatcgcagacccccaccgccaacgat

SEQ ID NO: 35716 - DNA, 54 bp, Emericella nidulans
gaattcactgcggccgccatgttggtctaataatatattcccatagcatctggt

SEQ ID NO: 35717 - DNA, 43 bp, Emericella nidulans
gttctcgagacgagcgatcgcgcacagtgcccttgacctgcat

SEQ ID NO: 35718 - DNA, 49 bp, Emericella nidulans
gaattcactgcggccgccatgcttcaagttgggataatcaccaacaaat

SEQ ID NO: 35719 - DNA, 42 bp, Emericella nidulans
gttctcgagacgagcgatcgcgcgcgtatttgtttgcgccac

SEQ ID NO: 35720 - DNA, 55 bp, Emericella nidulans
gaattcactgcggccgccatgataggtcttaagacagagtttatgttgggggaca

SEQ ID NO: 35721 - DNA, 55 bp, Emericella nidulans
gttctcgagacgagcgatcgcatattgattcattgttctatattcgctcatttgt

SEQ ID NO: 35722 - DNA, 52 bp, Emericella nidulans
gaattcactgcggccgccatgttagttcttattttcatatttgctcgcatca

SEQ ID NO: 35723 - DNA, 41 bp, Emericella nidulans
gttctcgagacgagcgatcgccgcccttaaagagcggtgcc

SEQ ID NO: 35724 - DNA, 42 bp, Emericella nidulans
gaattcactgcggccgccatgccatcattgttgggggcacga

SEQ ID NO: 35725 - DNA, 42 bp, Emericella nidulans
gttctcgagacgagcgatcgcccgggtgtcatcgacctcgtc

SEQ ID NO: 35726 - DNA, 50 bp, Emericella nidulans
gaattcactgcggccgccatggctatatacaggggtgcaccatcttgtcc

SEQ ID NO: 35727 - DNA, 42 bp, Emericella nidulans
gttctcgagacgagcgatcgccccttagcgccctccaggtcc

SEQ ID NO: 35728 - DNA, 42 bp, Emericella nidulans
gaattcactgcggccgccatgtggcggtcattcatcctgggt

SEQ ID NO: 35729 - DNA, 41 bp, Emericella nidulans
gttctcgagacgagcgatcgcggctccggcctgctctcctc

SEQ ID NO: 35730 - DNA, 51 bp, Emericella nidulans
gaattcactgcggccgccatggccttaacagggccctcgtctaaggagaga

SEQ ID NO: 35731 - DNA, 41 bp, Emericella nidulans; identical to SEQ ID NO: 35683

SEQ ID NO: 35732 - DNA, 46 bp, Emericella nidulans
gaattcactgcggccgccatgggagatcgcagaactgatcaaaaca

SEQ ID NO: 35733 - DNA, 41 bp, Emericella nidulans
gttctcgagacgagcgatcgctgaggaggcacggcgtgttg

SEQ ID NO: 35734 - DNA, 55 bp, Emericella nidulans
gaattcactgcggccgccatgttgagttactgctctctagatagcaccactttgc

SEQ ID NO: 35735 - DNA, 55 bp, Emericella nidulans
gttctcgagacgagcgatcgctaggaatgtttcgatattgatttcaagcgtgctg

SEQ ID NO: 35736 - DNA, 41 bp, Emericella nidulans
gaattcactgcggccgccatgtcgagcgctgcttccagcat

SEQ ID NO: 35737 - DNA, 41 bp, Emericella nidulans
gttctcgagacgagcgatcgcaccaacgccgcgcgaagaat

SEQ ID NO: 35738 - DNA, 51 bp, Emericella nidulans
gaattcactgcggccgccatgtcctagggttgatcctttaacttctgtttt

SEQ ID NO: 35739 - DNA, 41 bp, Emericella nidulans
gttctcgagacgagcgatcgcgccgaccccgccctgttagt

SEQ ID NO: 35740 - DNA, 43 bp, Emericella nidulans
gaattcactgcggccgccatgcagacaagtgctgctccgtccc

SEQ ID NO: 35741 - DNA, 42 bp, Emericella nidulans
gttctcgagacgagcgatcgcggcgcttgatgatggcgtcag

SEQ ID NO: 35742 - DNA, 54 bp, Emericella nidulans
gaattcactgcggccgccatgccctctaatacccttacatgtcattcctacaca

SEQ ID NO: 35743 - DNA, 41 bp, Emericella nidulans
gttctcgagacgagcgatcgccccatggccatgggaaaaga

SEQ ID NO: 35744 - DNA, 42 bp, Emericella nidulans
gaattcactgcggccgccatgtgcagacccgaggcagtgttc

SEQ ID NO: 35745 - DNA, 41 bp, Emericella nidulans
gttctcgagacgagcgatcgcggaggggctgcattgactcg

SEQ ID NO: 35746 - DNA, 56 bp, Emericella nidulans
gaattcactgcggccgccatgcttatatgatacaagtgaggctgacagtgattgtg

SEQ ID NO: 35747 - DNA, 53 bp, Emericella nidulans
gttctcgagacgagcgatcgccagcgtatacctgaatagtggacttctatccc

SEQ ID NO: 35748 - DNA, 51 bp, Emericella nidulans
gaattcactgcggccgccatgatgaccatgatagatcttaacccggacttg

SEQ ID NO: 35749 - DNA, 57 bp, Emericella nidulans
gttctcgagacgagcgatcgctaactcatacatagtcaatagtggaacgcagccata

SEQ ID NO: 35750 - DNA, 44 bp, Emericella nidulans
gaattcactgcggccgccatgcgactgaagttgctctgcgggtt

SEQ ID NO: 35751 - DNA, 41 bp, Emericella nidulans
gttctcgagacgagcgatcgcctggcgttggcactcaggga

SEQ ID NO: 35752 - DNA, 41 bp, Emericella nidulans
gaattcactgcggccgccatgggccgctttgagtggaaccc

SEQ ID NO: 35753 - DNA, 42 bp, Emericella nidulans
gttctcgagacgagcgatcgcccatacccccggggatgtttc

SEQ ID NO: 35754 - DNA, 41 bp, Emericella nidulans
gaattcactgcggccgccatgtggaacggtggcggatggat

SEQ ID NO: 35755 - DNA, 44 bp, Emericella nidulans
gttctcgagacgagcgatcgcaacacccgatgaacgcgataaga

SEQ ID NO: 35756 - DNA, 41 bp, Emericella nidulans
gaattcactgcggccgccatgggcgaccagaagcccggaac

SEQ ID NO: 35757 - DNA, 41 bp, Emericella nidulans
gttctcgagacgagcgatcgcgctcctcgcggccaacaaac

SEQ ID NO: 35758 - DNA, 49 bp, Emericella nidulans
gaattcactgcggccgccatgttgacaagtctcactattgggtatgtcg

SEQ ID NO: 35759 - DNA, 42 bp, Emericella nidulans
gttctcgagacgagcgatcgcgcgctgatagccatccgcaaa

SEQ ID NO: 35760 - DNA, 41 bp, Emericella nidulans
gaattcactgcggccgccatgccgcgacgccaggcaaatac

SEQ ID NO: 35761 - DNA, 52 bp, Emericella nidulans
gttctcgagacgagcgatcgcaagcgatctccgtatggacatattaatgaaa

SEQ ID NO: 35762 - DNA, 46 bp, Emericella nidulans
gaattcactgcggccgccatgcgaataaaccgcgtcactactaccc

SEQ ID NO: 35763 - DNA, 41 bp, Emericella nidulans
gttctcgagacgagcgatcgccgggaactggggtggcttcc

SEQ ID NO: 35764 - DNA, 42 bp, Emericella nidulans
gaattcactgcggccgccatgacgaacatttgcgccacaccc

SEQ ID NO: 35765 - DNA, 48 bp, Emericella nidulans
gttctcgagacgagcgatcgccggcctcttcattaagatgggttcgat

SEQ ID NO: 35766 - DNA, 54 bp, Emericella nidulans
gaattcactgcggccgccatgtttgatagaacgagacatacaaacacgccgaca

SEQ ID NO: 35767 - DNA, 41 bp, Emericella nidulans
gttctcgagacgagcgatcgcgccggcttgagcgagacgtg

SEQ ID NO: 35768 - DNA, 42 bp, Emericella nidulans
gaattcactgcggccgccatggccatgggcggatttgagcat

SEQ ID NO: 35769 - DNA, 42 bp, Emericella nidulans
gttctcgagacgagcgatcgctgctccatccaccgaggttcg

SEQ ID NO: 35770 - DNA, 41 bp, Emericella nidulans
gaattcactgcggccgccatgcccgagtctcctcgctgggt

SEQ ID NO: 35771 - DNA, 41 bp, Emericella nidulans
gttctcgagacgagcgatcgccctggctcatcgacggatgc

SEQ ID NO: 35772 - DNA, 51 bp, Emericella nidulans
gaattcactgcggccgccatggcttctacggaaggactcctcatctacagc

SEQ ID NO: 35773 - DNA, 46 bp, Emericella nidulans
gttctcgagacgagcgatcgccgtccagaagactgagcctcgtgtg

SEQ ID NO: 35774 - DNA, 42 bp, Emericella nidulans
gaattcactgcggccgccatgccggaaagcaaaaggcccaga

SEQ ID NO: 35775 - DNA, 41 bp, Emericella nidulans
gttctcgagacgagcgatcgctgcgcggttttgagctgacg

SEQ ID NO: 35776 - DNA, 42 bp, Emericella nidulans
gaattcactgcggccgccatgggactttcgcttcccccgaca

SEQ ID NO: 35777 - DNA, 45 bp, Emericella nidulans
gttctcgagacgagcgatcgctgacatctgtcgcagacttgcacc

SEQ ID NO: 35778 - DNA, 41 bp, Emericella nidulans
gaattcactgcggccgccatgtcccacatccgcatcaccgt

SEQ ID NO: 35779 - DNA, 42 bp, Emericella nidulans
gttctcgagacgagcgatcgcgctgtgcgtcggggtacagga

SEQ ID NO: 35780 - DNA, 42 bp, Emericella nidulans
gaattcactgcggccgccatgcgggtcagagccagcacgcta

SEQ ID NO: 35781 - DNA, 41 bp, Emericella nidulans
gttctcgagacgagcgatcgcgacgcgaatgtcggcaggtg

SEQ ID NO: 35782 - DNA, 57 bp, Emericella nidulans
gaattcactgcggccgccatggtgtacaggcaagtatcaagtagatattttgttttc

SEQ ID NO: 35783 - DNA, 43 bp, Emericella nidulans
gttctcgagacgagcgatcgccaccacctggctgttgctcacc

SEQ ID NO: 35784 - DNA, 41 bp, Emericella nidulans
gaattcactgcggccgccatgcgccgtgacaccagcctgaa

SEQ ID NO: 35785 - DNA, 47 bp, Emericella nidulans
gttctcgagacgagcgatcgctggcattaggcttactctccccctta

SEQ ID NO: 35786 - DNA, 41 bp, Emericella nidulans
gaattcactgcggccgccatggacgaggcggtctccgcaaa

SEQ ID NO: 35787 - DNA, 41 bp, Emericella nidulans
gttctcgagacgagcgatcgctcccagctgcccactcaccc

SEQ ID NO: 35788 - DNA, 41 bp, Emericella nidulans
gaattcactgcggccgccatgtggatgcgatgggaggtgcc

SEQ ID NO: 35789 - DNA, 51 bp, Emericella nidulans
gttctcgagacgagcgatcgcgtcttcttttctagctgggtcagcatgcac

SEQ ID NO: 35790 - DNA, 41 bp, Emericella nidulans
gaattcactgcggccgccatggcggcttgcaaggaggtcgt

SEQ ID NO: 35791 - DNA, 48 bp, Emericella nidulans
gttctcgagacgagcgatcgcgtcgaccttgatagagcgatagattcg

SEQ ID NO: 35792 - DNA, 41 bp, Emericella nidulans
gaattcactgcggccgccatgttgccagccggttcgtccat

SEQ ID NO: 35793 - DNA, 41 bp, Emericella nidulans
gttctcgagacgagcgatcgcctgccgccgatcgtactcca

SEQ ID NO: 35794 - DNA, 41 bp, Emericella nidulans
gaattcactgcggccgccatggcgccttctgctcggcatgt

SEQ ID NO: 35795 - DNA, 49 bp, Emericella nidulans
gttctcgagacgagcgatcgctttcatggcaaaactagttcgccctttt

SEQ ID NO: 35796 - DNA, 42 bp, Emericella nidulans
gaattcactgcggccgccatgcgcgttggcattcttgcttcc

SEQ ID NO: 35797 - DNA, 45 bp, Emericella nidulans
gttctcgagacgagcgatcgctcgcattctgtaaaagctgcacga

SEQ ID NO: 35798 - DNA, 43 bp, Emericella nidulans
gaattcactgcggccgccatgcgaccctcatcaagcggtacga

SEQ ID NO: 35799 - DNA, 41 bp, Emericella nidulans
gttctcgagacgagcgatcgcgcccgcatgctcgacaattt

SEQ ID NO: 35800 - DNA, 41 bp, Emericella nidulans
gaattcactgcggccgccatgctgcggctgcacaaaccaca

SEQ ID NO: 35801 - DNA, 46 bp, Emericella nidulans
gttctcgagacgagcgatcgctcaacagagcccagaagcgattcaa

SEQ ID NO: 35802 - DNA, 42 bp, Emericella nidulans
gaattcactgcggccgccatggccgcaaacagggccagattc

SEQ ID NO: 35803 - DNA, 46 bp, Emericella nidulans
gttctcgagacgagcgatcgctttttcctggtcacgctctggctta

SEQ ID NO: 35804 - DNA, 50 bp, Emericella nidulans
gaattcactgcggccgccatgtggagatgtgacattcatttcttacacga

SEQ ID NO: 35805 - DNA, 46 bp, Emericella nidulans
gttctcgagacgagcgatcgccgccagtatggtccttggtagcaca

SEQ ID NO: 35806 - DNA, 41 bp, Emericella nidulans
gaattcactgcggccgccatgcggcgtgaatgtgcctgtcg

SEQ ID NO: 35807 - DNA, 43 bp, Emericella nidulans
gttctcgagacgagcgatcgctggacgcctgtgtcaggttctt

SEQ ID NO: 35808 - DNA, 49 bp, Emericella nidulans
gaattcactgcggccgccatggaaaagatcatcttcgaggaggctttca

SEQ ID NO: 35809 - DNA, 48 bp, Emericella nidulans
gttctcgagacgagcgatcgcttagccttttccaggaactgaatacga

SEQ ID NO: 35810 - DNA, 45 bp, Emericella nidulans
gaattcactgcggccgccatggagtcatcgcttcccaagtgggtt

SEQ ID NO: 35811 - DNA, 43 bp, Emericella nidulans
gttctcgagacgagcgatcgcccgaagactgacttgggttcca

SEQ ID NO: 35812 - DNA, 42 bp, Emericella nidulans
gaattcactgcggccgccatgcctggctgggctcgagcatct

SEQ ID NO: 35813 - DNA, 57 bp, Emericella nidulans
gttctcgagacgagcgatcgcatatacatagacaaagtcctcattctcaaaatctgt

SEQ ID NO: 35814 - DNA, 41 bp, Emericella nidulans
gaattcactgcggccgccatgattcccgtcccaggcgagca

SEQ ID NO: 35815 - DNA, 41 bp, Emericella nidulans
gttctcgagacgagcgatcgcgtagggccgggaaaaacacg

SEQ ID NO: 35816 - DNA, 42 bp, Emericella nidulans
gaattcactgcggccgccatgcgttcccataatgccgcgaga

SEQ ID NO: 35817 - DNA, 41 bp, Emericella nidulans
gttctcgagacgagcgatcgccgggttgcccagccagttga

SEQ ID NO: 35818 - DNA, 41 bp, Emericella nidulans
gaattcactgcggccgccatgtcgcctacgggcgacgttct

SEQ ID NO: 35819 - DNA, 53 bp, Emericella nidulans
gttctcgagacgagcgatcgctatatgtaggagctccatcctcagcacgctct

SEQ ID NO: 35820 - DNA, 55 bp, Emericella nidulans
gaattcactgcggccgccatggaacaatacaggatcctaccagatgatatctaca

SEQ ID NO: 35821 - DNA, 57 bp, Emericella nidulans
gttctcgagacgagcgatcgctattaattattaagcatttcttctatgcccaattct

SEQ ID NO: 35822 - DNA, 41 bp, Emericella nidulans
gaattcactgcggccgccatggccgagggatccgctgattg

SEQ ID NO: 35823 - DNA, 57 bp, Emericella nidulans
gttctcgagacgagcgatcgcgattagagcatactcagagaagaagacacttacatc

SEQ ID NO: 35824 - DNA, 47 bp, Emericella nidulans
gaattcactgcggccgccatgggtaagttacctggagtcacgggcac

SEQ ID NO: 35825 - DNA, 41 bp, Emericella nidulans
gttctcgagacgagcgatcgcgctctcaacggccgccatgt

SEQ ID NO: 35826 - DNA, 45 bp, Emericella nidulans
gaattcactgcggccgccatgcgctggtgaagggcttcaagatgt

SEQ ID NO: 35827 - DNA, 41 bp, Emericella nidulans
gttctcgagacgagcgatcgcccgccgggtccaccttgttt

SEQ ID NO: 35828 - DNA, 41 bp, Emericella nidulans
gaattcactgcggccgccatgcggtggttgtgaccgggaag

SEQ ID NO: 35829 - DNA, 52 bp, Emericella nidulans
gttctcgagacgagcgatcgcaatgcgagattttgtcctaccttgattttcc

SEQ ID NO: 35830 - DNA, 47 bp, Emericella nidulans
gaattcactgcggccgccatggcagcagccgatattctcgagtacga

SEQ ID NO: 35831 - DNA, 41 bp, Emericella nidulans; identical to SEQ ID NO: 34339

SEQ ID NO: 35832 - DNA, 48 bp, Emericella nidulans
gaattcactgcggccgccatgtgcaatatgaagttcatcctccccctc

SEQ ID NO: 35833 - DNA, 41 bp, Emericella nidulans
gttctcgagacgagcgatcgccgctcagcgtggcaccaaat

SEQ ID NO: 35834 - DNA, 41 bp, Emericella nidulans
gaattcactgcggccgccatgtcagtgcgaatcccgcctcc

SEQ ID NO: 35835 - DNA, 49 bp, Emericella nidulans
gttctcgagacgagcgatcgctggcgtgtagactgatctatctcgtcct

SEQ ID NO: 35836 - DNA, 51 bp, Emericella nidulans
gaattcactgcggccgccatgaactttcactctctggcaaacttcctggat

SEQ ID NO: 35837 - DNA, 53 bp, Emericella nidulans
gttctcgagacgagcgatcgcttgctcggcgaagttgattcgactagtatatg

SEQ ID NO: 35838 - DNA, 41 bp, Emericella nidulans
gaattcactgcggccgccatgcttgggatgcctgggatgct

SEQ ID NO: 35839 - DNA, 41 bp, Emericella nidulans
gttctcgagacgagcgatcgcgggcgatgcgttctgaccgt

SEQ ID NO: 35840 - DNA, 41 bp, Emericella nidulans
gaattcactgcggccgccatgattctccggccagcccaacc

SEQ ID NO: 35841 - DNA, 41 bp, Emericella nidulans
gttctcgagacgagcgatcgccccgtttccatcgccattcc

SEQ ID NO: 35842 - DNA, 41 bp, Emericella nidulans
gaattcactgcggccgccatgcgcccaagcgaagatgggtc

SEQ ID NO: 35843 - DNA, 42 bp, Emericella nidulans
gttctcgagacgagcgatcgcccctcgtctgcaagctgcgta

SEQ ID NO: 35844 - DNA, 47 bp, Emericella nidulans
gaattcactgcggccgccatgaacccatacgaactcagtcctgttga

SEQ ID NO: 35845 - DNA, 41 bp, Emericella nidulans
gttctcgagacgagcgatcgcacgggggacgcgttgtttga

SEQ ID NO: 35846 - DNA, 44 bp, Emericella nidulans
gaattcactgcggccgccatgcgcagtgattctctccctgcacc

SEQ ID NO: 35847 - DNA, 45 bp, Emericella nidulans
gttctcgagacgagcgatcgcggaggtgtggtctgctccagtgaa

SEQ ID NO: 35848 - DNA, 41 bp, Emericella nidulans
gaattcactgcggccgccatgccatccagggcgaggaggtg

SEQ ID NO: 35849 - DNA, 51 bp, Emericella nidulans
gttctcgagacgagcgatcgccttgttttgagtaagttcgaaccgtctagc

SEQ ID NO: 35850 - DNA, 41 bp, Emericella nidulans
gaattcactgcggccgccatgggccgctttcatgggcattg

SEQ ID NO: 35851 - DNA, 43 bp, Emericella nidulans
gttctcgagacgagcgatcgcctcgccttcttccgcttgttcc

SEQ ID NO: 35852 - DNA, 57 bp, Emericella nidulans
gaattcactgcggccgccatgcactttttacattgtttactctgtactatctcctcc

SEQ ID NO: 35853 - DNA, 48 bp, Emericella nidulans
gttctcgagacgagcgatcgctattctatgcgagtccaacgtagaggg

SEQ ID NO: 35854 - DNA, 49 bp, Emericella nidulans
gaattcactgcggccgccatggttgattcgtttgactcttgcgttcatc

SEQ ID NO: 35855 - DNA, 46 bp, Emericella nidulans
gttctcgagacgagcgatcgcgagctggtgaattgacggaagatgg

SEQ ID NO: 35856 - DNA, 43 bp, Emericella nidulans
gaattcactgcggccgccatgggcaccacgagaacttggacga

SEQ ID NO: 35857 - DNA, 41 bp, Emericella nidulans
gttctcgagacgagcgatcgcacttgcgggcggtgttctgg

SEQ ID NO: 35858 - DNA, 45 bp, Emericella nidulans
gaattcactgcggccgccatgcctgaacctgaacgaatgcgccta

SEQ ID NO: 35859 - DNA, 44 bp, Emericella nidulans
gttctcgagacgagcgatcgctcgcccagatcttctcctcttcg

SEQ ID NO: 35860 - DNA, 41 bp, Emericella nidulans
gaattcactgcggccgccatgaggtgctggtcgtcggtggc

SEQ ID NO: 35861 - DNA, 57 bp, Emericella nidulans
gttctcgagacgagcgatcgcagtcgagagtgaaattgtcaatgttgagcgaatcct

SEQ ID NO: 35862 - DNA, 41 bp, Emericella nidulans
gaattcactgcggccgccatgtggctgcggtcaaggctgag

SEQ ID NO: 35863 - DNA, 49 bp, Emericella nidulans
gttctcgagacgagcgatcgccgatcataatccgtaccttgcttactgg

SEQ ID NO: 35864 - DNA, 44 bp, Emericella nidulans
gaattcactgcggccgccatggccagatttgctggaggtgggat

SEQ ID NO: 35865 - DNA, 44 bp, Emericella nidulans
gttctcgagacgagcgatcgcgctccctagcaagtctgcaccca

SEQ ID NO: 35866 - DNA, 41 bp, Emericella nidulans
gaattcactgcggccgccatgccgctgtcggaatgggtgct

SEQ ID NO: 35867 - DNA, 47 bp, Emericella nidulans
gttctcgagacgagcgatcgcatttgctcgagcatctgctctgtctc

SEQ ID NO: 35868 - DNA, 40 bp, Emericella nidulans
gaattcactgcggccgccatgggcgccgcaacgtctacga

SEQ ID NO: 35869 - DNA, 42 bp, Emericella nidulans
gttctcgagacgagcgatcgcccgaccaaactgccttcgttc

SEQ ID NO: 35870 - DNA, 50 bp, Emericella nidulans
gaattcactgcggccgccatggccgcgtaatactaaagaaatccagagcc

SEQ ID NO: 35871 - DNA, 41 bp, Emericella nidulans
gttctcgagacgagcgatcgcctcctgcacccatgccctcc

SEQ ID NO: 35872 - DNA, 41 bp, Emericella nidulans
gaattcactgcggccgccatgtcgagcagagcggcaaaagc

SEQ ID NO: 35873 - DNA, 48 bp, Emericella nidulans
gttctcgagacgagcgatcgctacttgaagcggaaatctagtcgcttg

SEQ ID NO: 35874 - DNA, 55 bp, Emericella nidulans
gaattcactgcggccgccatgtgattcgaatcattttctctagctattctctctg

SEQ ID NO: 35875 - DNA, 41 bp, Emericella nidulans
gttctcgagacgagcgatcgcggctaccgctgggagcagca

SEQ ID NO: 35876 - DNA, 42 bp, Emericella nidulans
gaattcactgcggccgccatgcggtttcacggcagggaacat

SEQ ID NO: 35877 - DNA, 43 bp, Emericella nidulans
gttctcgagacgagcgatcgctccaaggccagtgacggagacc

SEQ ID NO: 35878 - DNA, 40 bp, Emericella nidulans
gaattcactgcggccgccatgagtcgcaccccgcagaccc

SEQ ID NO: 35879 - DNA, 55 bp, Emericella nidulans
gttctcgagacgagcgatcgcaagccagtactggaccagatcaaataatgatacc

SEQ ID NO: 35880 - DNA, 44 bp, Emericella nidulans
gaattcactgcggccgccatgcccgtccgttaatgtccgacacc

SEQ ID NO: 35881 - DNA, 42 bp, Emericella nidulans
gttctcgagacgagcgatcgcgcttcgaccgcgttatgcacc

SEQ ID NO: 35882 - DNA, 43 bp, Emericella nidulans
gaattcactgcggccgccatgtggaagaagctgaggcggcatt

SEQ ID NO: 35883 - DNA, 44 bp, Emericella nidulans
gttctcgagacgagcgatcgccagccttctcctccttcgcctca

SEQ ID NO: 35884 - DNA, 52 bp, Emericella nidulans
gaattcactgcggccgccatgctaacacgttctacaaagttaccggctgctc

SEQ ID NO: 35885 - DNA, 42 bp, Emericella nidulans
gttctcgagacgagcgatcgccttgaaaatcccgtcgccact

SEQ ID NO: 35886 - DNA, 51 bp, Emericella nidulans
gaattcactgcggccgccatgctatgtttactacgtggtctttatcgtggc

SEQ ID NO: 35887 - DNA, 51 bp, Emericella nidulans
gttctcgagacgagcgatcgcacatttcatctttattccggctcttaattc

SEQ ID NO: 35888 - DNA, 49 bp, Emericella nidulans
gaattcactgcggccgccatgctgtcgataccagcgactagcgtactca

SEQ ID NO: 35889 - DNA, 43 bp, Emericella nidulans
gttctcgagacgagcgatcgctcgcagccgtacgcagtctcac

SEQ ID NO: 35890 - DNA, 41 bp, Emericella nidulans
gaattcactgcggccgccatgaccgcagctgttggccttgg

SEQ ID NO: 35891 - DNA, 42 bp, Emericella nidulans
gttctcgagacgagcgatcgcgccctcgctctgcattcacca

SEQ ID NO: 35892 - DNA, 48 bp, Emericella nidulans
gaattcactgcggccgccatggttgaagctctgtggatacggtatgtc

SEQ ID NO: 35893 - DNA, 51 bp, Emericella nidulans
gttctcgagacgagcgatcgcctctctctctgctagcaaacttgacaacat

SEQ ID NO: 35894 - DNA, 43 bp, Emericella nidulans
gaattcactgcggccgccatgccgcaaaccggtagagcccagt

SEQ ID NO: 35895 - DNA, 41 bp, Emericella nidulans
gttctcgagacgagcgatcgccgtccgcagcggctcctaga

SEQ ID NO: 35896 - DNA, 50 bp, Emericella nidulans
gaattcactgcggccgccatgttcattcagcacgttatacgacaaattca

SEQ ID NO: 35897 - DNA, 41 bp, Emericella nidulans
gttctcgagacgagcgatcgctcggcaaatcgggtgcactt

SEQ ID NO: 35898 - DNA, 43 bp, Emericella nidulans
gaattcactgcggccgccatgggcaacgttctgctcctcatgc

SEQ ID NO: 35899 - DNA, 44 bp, Emericella nidulans
gttctcgagacgagcgatcgcgggagctacatgccctggcactc

SEQ ID NO: 35900 - DNA, 43 bp, Emericella nidulans
gaattcactgcggccgccatgtgctcatcacggaacagggctc

SEQ ID NO: 35901 - DNA, 46 bp, Emericella nidulans
gttctcgagacgagcgatcgcgaaatccgaaaagcccactttaggc

SEQ ID NO: 35902 - DNA, 50 bp, Emericella nidulans
gaattcactgcggccgccatgtggcaaaagtacgtttgtagattggcaga

SEQ ID NO: 35903 - DNA, 41 bp, Emericella nidulans
gttctcgagacgagcgatcgccaacaaggccctccccacga

SEQ ID NO: 35904 - DNA, 41 bp, Emericella nidulans
gaattcactgcggccgccatgcgcgatgctcgcaccatgag

SEQ ID NO: 35905 - DNA, 47 bp, Emericella nidulans
gttctcgagacgagcgatcgctgcgacaatcctagaataagctctcg

SEQ ID NO: 35906 - DNA, 41 bp, Emericella nidulans
gaattcactgcggccgccatgcaaccacggctctgcaccca

SEQ ID NO: 35907 - DNA, 41 bp, Emericella nidulans
gttctcgagacgagcgatcgcgcatgcacacgcaggcattg

SEQ ID NO: 35908 - DNA, 45 bp, Emericella nidulans
gaattcactgcggccgccatgccatgacgttatcagagtggcaca

SEQ ID NO: 35909 - DNA, 41 bp, Emericella nidulans
gttctcgagacgagcgatcgccgcgtggtcaccgcatagga

SEQ ID NO: 35910 - DNA, 41 bp, Emericella nidulans
gaattcactgcggccgccatgccagttcacgccctccgtca

SEQ ID NO: 35911 - DNA, 41 bp, Emericella nidulans
gttctcgagacgagcgatcgctgctggccaccggcacacta

SEQ ID NO: 35912 - DNA, 47 bp, Emericella nidulans
gaattcactgcggccgccatggaacttcaatgatgagggagtcaagc

SEQ ID NO: 35913 - DNA, 41 bp, Emericella nidulans
gttctcgagacgagcgatcgctcttgcccgccaacacacca

SEQ ID NO: 35914 - DNA, 41 bp, Emericella nidulans
gaattcactgcggccgccatgccatccacctgcgtggcaga

SEQ ID NO: 35915 - DNA, 41 bp, Emericella nidulans
gttctcgagacgagcgatcgctccttgcgttcggggtccag

SEQ ID NO: 35916 - DNA, 42 bp, Emericella nidulans
gaattcactgcggccgccatggggtggctagtcggggcaaga

SEQ ID NO: 35917 - DNA, 52 bp, Emericella nidulans
gttctcgagacgagcgatcgctataaagagccaatcaatattggaatcatcc

SEQ ID NO: 35918 - DNA, 41 bp, Emericella nidulans
gaattcactgcggccgccatgcccgcagccgattgagtcgt

SEQ ID NO: 35919 - DNA, 41 bp, Emericella nidulans
gttctcgagacgagcgatcgcggctctggtttcggcgctct

SEQ ID NO: 35920 - DNA, 41 bp, Emericella nidulans
gaattcactgcggccgccatgcggcaagcaccatggcaaga

SEQ ID NO: 35921 - DNA, 44 bp, Emericella nidulans
gttctcgagacgagcgatcgccgagaatgcgaagactgccctgt

SEQ ID NO: 35922 - DNA, 45 bp, Emericella nidulans
gaattcactgcggccgccatgtgcagcatttcgactttttcctct

SEQ ID NO: 35923 - DNA, 52 bp, Emericella nidulans
gttctcgagacgagcgatcgcggttgtatccatactcggagagaacatcctg

SEQ ID NO: 35924 - DNA, 44 bp, Emericella nidulans
gaattcactgcggccgccatggcttgccagaggaacctctttgt

SEQ ID NO: 35925 - DNA, 41 bp, Emericella nidulans
gttctcgagacgagcgatcgcggcggcgcatcgaaggacta

SEQ ID NO: 35926 - DNA, 41 bp, Emericella nidulans
gaattcactgcggccgccatgggtcgttgcggcgccattta

SEQ ID NO: 35927 - DNA, 41 bp, Emericella nidulans
gttctcgagacgagcgatcgcgctccgcaaaccgcgaaaga

SEQ ID NO: 35928 - DNA, 41 bp, Emericella nidulans
gaattcactgcggccgccatgaggcgcggctgtcagagtcc

SEQ ID NO: 35929 - DNA, 41 bp, Emericella nidulans
gttctcgagacgagcgatcgcgccacatcagccgcaagcaa

SEQ ID NO: 35930 - DNA, 57 bp, Emericella nidulans
gaattcactgcggccgccatgaaataaaaattagctctatacagtaccctgcagttc

SEQ ID NO: 35931 - DNA, 51 bp, Emericella nidulans
gttctcgagacgagcgatcgcttgttaacaacctattcagcaaggaagcct

SEQ ID NO: 35932 - DNA, 43 bp, Emericella nidulans
gaattcactgcggccgccatgtcgttgttcgactgtccgcacc

SEQ ID NO: 35933 - DNA, 52 bp, Emericella nidulans
gttctcgagacgagcgatcgctcatcagttatgcttgaggacctcttcagtg

SEQ ID NO: 35934 - DNA, 41 bp, Emericella nidulans
gaattcactgcggccgccatggcgattcgtttcggcgtgga

SEQ ID NO: 35935 - DNA, 42 bp, Emericella nidulans
gttctcgagacgagcgatcgcacaacctccagcggcctcaca

SEQ ID NO: 35936 - DNA, 44 bp, Emericella nidulans
gaattcactgcggccgccatggcgtctgtgtgtgcgatcaagga

SEQ ID NO: 35937 - DNA, 49 bp, Emericella nidulans
gttctcgagacgagcgatcgccacacgcagatacctgactgaagaagca

SEQ ID NO: 35938 - DNA, 45 bp, Emericella nidulans
gaattcactgcggccgccatgtgacagatcaggggccctaataga

SEQ ID NO: 35939 - DNA, 48 bp, Emericella nidulans
gttctcgagacgagcgatcgcagttgccggaagcttagacttgctctg

SEQ ID NO: 35940 - DNA, 51 bp, Emericella nidulans
gaattcactgcggccgccatgttatctcttgatcgtctgaagccaacctca

SEQ ID NO: 35941 - DNA, 52 bp, Emericella nidulans
gttctcgagacgagcgatcgctgtgtggataaacaagacattaacctgttcc

SEQ ID NO: 35942 - DNA, 48 bp, Emericella nidulans
gaattcactgcggccgccatgccttcctcatcaatcaacataacagca

SEQ ID NO: 35943 - DNA, 47 bp, Emericella nidulans
gttctcgagacgagcgatcgcggcccttgatggtaaatcatgagtcg

SEQ ID NO: 35944 - DNA, 44 bp, Emericella nidulans
gaattcactgcggccgccatgaatactgtgagcagccgggaact

SEQ ID NO: 35945 - DNA, 51 bp, Emericella nidulans
gttctcgagacgagcgatcgcctatgagtacagcagctcagaaagcatgga

SEQ ID NO: 35946 - DNA, 41 bp, Emericella nidulans
gaattcactgcggccgccatgggcgcgcctgttttgcttgt

SEQ ID NO: 35947 - DNA, 44 bp, Emericella nidulans
gttctcgagacgagcgatcgcgggaagaggaagacgcacgttca

SEQ ID NO: 35948 - DNA, 43 bp, Emericella nidulans
gaattcactgcggccgccatgtgcgcaaattgcttcaggttcg

SEQ ID NO: 35949 - DNA, 41 bp, Emericella nidulans
gttctcgagacgagcgatcgcgtggggcgttgggcagtacg

SEQ ID NO: 35950 - DNA, 46 bp, Emericella nidulans
gaattcactgcggccgccatggcattggtacgtattgagcgcactg

SEQ ID NO: 35951 - DNA, 42 bp, Emericella nidulans
gttctcgagacgagcgatcgcagctccaatgccgctttcaga

SEQ ID NO: 35952 - DNA, 54 bp, Emericella nidulans
gaattcactgcggccgccatgtgttcctgtttgttttacattttatcaacctcc

SEQ ID NO: 35953 - DNA, 43 bp, Emericella nidulans
gttctcgagacgagcgatcgcccatcccggatcttcggctaca

SEQ ID NO: 35954 - DNA, 44 bp, Emericella nidulans
gaattcactgcggccgccatgtccgccatcaaacattccaactg

SEQ ID NO: 35955 - DNA, 41 bp, Emericella nidulans
gttctcgagacgagcgatcgcggtgacgcctttggctgcaa

SEQ ID NO: 35956 - DNA, 41 bp, Emericella nidulans
gaattcactgcggccgccatgctgggtcgccaccatggaca

SEQ ID NO: 35957 - DNA, 46 bp, Emericella nidulans
gttctcgagacgagcgatcgccccattctgaagaaccagttgatgg

SEQ ID NO: 35958 - DNA, 51 bp, Emericella nidulans
gaattcactgcggccgccatgcacattcagcctattattttctgggcgtca

SEQ ID NO: 35959 - DNA, 42 bp, Emericella nidulans
gttctcgagacgagcgatcgctgctgctgctgccctttctgc

SEQ ID NO: 35960 - DNA, 42 bp, Emericella nidulans
gaattcactgcggccgccatggatggttgcacgcaagcctga

SEQ ID NO: 35961 - DNA, 41 bp, Emericella nidulans
gttctcgagacgagcgatcgcggcagcgcacaccagagcag

SEQ ID NO: 35962 - DNA, 41 bp, Emericella nidulans
gaattcactgcggccgccatgcagctccggcggttggcata

SEQ ID NO: 35963 - DNA, 52 bp, Emericella nidulans
gttctcgagacgagcgatcgcgaacaattccacgacctttctatcatcatcc

SEQ ID NO: 35964 - DNA, 41 bp, Emericella nidulans
gaattcactgcggccgccatggtcgacgcgctgaggaggct

SEQ ID NO: 35965 - DNA, 41 bp, Emericella nidulans
gttctcgagacgagcgatcgctcgggacttcttcggcgtga

SEQ ID NO: 35966 - DNA, 41 bp, Emericella nidulans
gaattcactgcggccgccatgtcggtcaggagcagccggta

SEQ ID NO: 35967 - DNA, 41 bp, Emericella nidulans
gttctcgagacgagcgatcgcggtccggtagccccacgact

SEQ ID NO: 35968 - DNA, 45 bp, Emericella nidulans
gaattcactgcggccgccatgcgaccccgatcctatgcaattcaa

SEQ ID NO: 35969 - DNA, 44 bp, Emericella nidulans
gttctcgagacgagcgatcgctctcactggctgtccgagcaaca

SEQ ID NO: 35970 - DNA, 47 bp, Emericella nidulans
gaattcactgcggccgccatggtcttgcaggtattttcgccttcaca

SEQ ID NO: 35971 - DNA, 43 bp, Emericella nidulans
gttctcgagacgagcgatcgctctgcgcttttcctgtcgtcca

SEQ ID NO: 35972 - DNA, 41 bp, Emericella nidulans
gaattcactgcggccgccatgcggtgccatctgggtctgaa

SEQ ID NO: 35973 - DNA, 41 bp, Emericella nidulans
gttctcgagacgagcgatcgcgtcgtcgatcggccggagaa

SEQ ID NO: 35974 - DNA, 41 bp, Emericella nidulans
gaattcactgcggccgccatgcgggccccctagggtcaaaa

SEQ ID NO: 35975 - DNA, 41 bp, Emericella nidulans
gttctcgagacgagcgatcgctgatgcgccatccgcaacag

SEQ ID NO: 35976 - DNA, 51 bp, Emericella nidulans
gaattcactgcggccgccatgacattacctgaagcgcgaattctactttga

SEQ ID NO: 35977 - DNA, 41 bp, Emericella nidulans
gttctcgagacgagcgatcgcagcgattcgccaaccgctca

SEQ ID NO: 35978 - DNA, 42 bp, Emericella nidulans
gaattcactgcggccgccatggccgccggtcaaagcagagtt

SEQ ID NO: 35979 - DNA, 42 bp, Emericella nidulans
gttctcgagacgagcgatcgctctcctgctcgtccggcgtta

SEQ ID NO: 35980 - DNA, 45 bp, Emericella nidulans
gaattcactgcggccgccatgcctgccaatccattcgctatttcg

SEQ ID NO: 35981 - DNA, 47 bp, Emericella nidulans
gttctcgagacgagcgatcgcggcctgagcctgtttgataggtttcg

SEQ ID NO: 35982 - DNA, 42 bp, Emericella nidulans
gaattcactgcggccgccatgtcgcacaacagcagggagctg

SEQ ID NO: 35983 - DNA, 54 bp, Emericella nidulans
gttctcgagacgagcgatcgcataacaatagcaaaattattcctcgttttccct

SEQ ID NO: 35984 - DNA, 54 bp, Emericella nidulans
gaattcactgcggccgccatgctgatattcatttctcatttctcatttctcatc

SEQ ID NO: 35985 - DNA, 42 bp, Emericella nidulans
gttctcgagacgagcgatcgccgtgcgcgaggcatatcttgg

SEQ ID NO: 35986 - DNA, 41 bp, Emericella nidulans
gaattcactgcggccgccatggtccgctgcgcgggttgtag

SEQ ID NO: 35987 - DNA, 57 bp, Emericella nidulans
gttctcgagacgagcgatcgcatatagagggtaggaaccttctagaaacaggcgatg

SEQ ID NO: 35988 - DNA, 41 bp, Emericella nidulans
gaattcactgcggccgccatgcctccgccacctgcaagagc

SEQ ID NO: 35989 - DNA, 41 bp, Emericella nidulans
gttctcgagacgagcgatcgccggcgagtgcgggtagttcg

SEQ ID NO: 35990 - DNA, 41 bp, Emericella nidulans
gaattcactgcggccgccatgtcgcccccacctgaacttcg

SEQ ID NO: 35991 - DNA, 43 bp, Emericella nidulans
gttctcgagacgagcgatcgctggaaggcgttgaatgctttgt

SEQ ID NO: 35992 - DNA, 47 bp, Emericella nidulans
gaattcactgcggccgccatgtgccaaagagtgagagtgggaaagtg

SEQ ID NO: 35993 - DNA, 42 bp, Emericella nidulans
gttctcgagacgagcgatcgctgacgccgaggagaccgaatg

SEQ ID NO: 35994 - DNA, 48 bp, Emericella nidulans
gaattcactgcggccgccatgcgctttctgaaatcagtgggttcatcc

SEQ ID NO: 35995 - DNA, 42 bp, Emericella nidulans
gttctcgagacgagcgatcgctccaagctccgcagcttcctg

SEQ ID NO: 35996 - DNA, 42 bp, Emericella nidulans
gaattcactgcggccgccatgcagggcagcacatggggaaga

SEQ ID NO: 35997 - DNA, 48 bp, Emericella nidulans
gttctcgagacgagcgatcgctttttgtcttcaagattccacctcgtg

SEQ ID NO: 35998 - DNA, 44 bp, Emericella nidulans
gaattcactgcggccgccatggaagaggaggagctggatgaggc

SEQ ID NO: 35999 - DNA, 42 bp, Emericella nidulans
gttctcgagacgagcgatcgctgcctttttacccgcagtggc

SEQ ID NO: 36000 - DNA, 52 bp, Emericella nidulans
gaattcactgcggccgccatgcaaaatgccatcagtatacacccatattaca

SEQ ID NO: 36001 - DNA, 41 bp, Emericella nidulans
gttctcgagacgagcgatcgccgacagcgcgaacggtctat

SEQ ID NO: 36002 - DNA, 41 bp, Emericella nidulans
gaattcactgcggccgccatggcggtcgggccggtctaatc

SEQ ID NO: 36003 - DNA, 41 bp, Emericella nidulans
gttctcgagacgagcgatcgcctggcgaggcagtgcggaat

SEQ ID NO: 36004 - DNA, 41 bp, Emericella nidulans
gaattcactgcggccgccatgccgcgcggagtcaaggattc

SEQ ID NO: 36005 - DNA, 42 bp, Emericella nidulans
gttctcgagacgagcgatcgcggggttcattacggggacggt

SEQ ID NO: 36006 - DNA, 43 bp, Emericella nidulans; identical to SEQ ID NO: 35684

SEQ ID NO: 36007 - DNA, 57 bp, Emericella nidulans; identical to SEQ ID NO: 35685

SEQ ID NO: 36008 - DNA, 41 bp, Emericella nidulans
gaattcactgcggccgccatggcagggggtgcccatccaac

SEQ ID NO: 36009 - DNA, 50 bp, Emericella nidulans
gttctcgagacgagcgatcgcacgtagcctactaagaatcggacgccata

SEQ ID NO: 36010 - DNA, 42 bp, Emericella nidulans
gaattcactgcggccgccatgggttgcggagaagctggcaca

SEQ ID NO: 36011 - DNA, 41 bp, Emericella nidulans
gttctcgagacgagcgatcgccgccgtcttggccggatgta

SEQ ID NO: 36012 - DNA, 43 bp, Emericella nidulans
gaattcactgcggccgccatgcgctgtggcgacataaacacca

SEQ ID NO: 36013 - DNA, 44 bp, Emericella nidulans
gttctcgagacgagcgatcgccgaggacgaatcgatcacggaag

SEQ ID NO: 36014 - DNA, 55 bp, Emericella nidulans
gaattcactgcggccgccatgttacactttgttggaaaatatttaggctgcgttg

SEQ ID NO: 36015 - DNA, 47 bp, Emericella nidulans
gttctcgagacgagcgatcgcaaatcttcaggcgtgagagtggaggg

SEQ ID NO: 36016 - DNA, 48 bp, Emericella nidulans
gaattcactgcggccgccatgactatgcagtacactccatttgcctca

SEQ ID NO: 36017 - DNA, 48 bp, Emericella nidulans
gttctcgagacgagcgatcgccttcgacctaccacagagacgttttca

SEQ ID NO: 36018 - DNA, 44 bp, Emericella nidulans
gaattcactgcggccgccatggcaaacctggatttgcaccgaga

SEQ ID NO: 36019 - DNA, 46 bp, Emericella nidulans
gttctcgagacgagcgatcgctcaaaaatagccaatcatgcgcacc

SEQ ID NO: 36020 - DNA, 41 bp, Emericella nidulans
gaattcactgcggccgccatgtgtcgttgtcctcgcggtgc

SEQ ID NO: 36021 - DNA, 43 bp, Emericella nidulans
gttctcgagacgagcgatcgctcctcctggtagctgccactgc

SEQ ID NO: 36022 - DNA, 44 bp, Emericella nidulans
gaattcactgcggccgccatgtccgatagcgacgaaagcgatca

SEQ ID NO: 36023 - DNA, 50 bp, Emericella nidulans
gttctcgagacgagcgatcgctgaaagtaaatgtatcaccacccttctcg

SEQ ID NO: 36024 - DNA, 51 bp, Emericella nidulans
gaattcactgcggccgccatgggcaactatgcagtacactccatttgcctc

SEQ ID NO: 36025 - DNA, 48 bp, Emericella nidulans; identical to SEQ ID NO: 36017

SEQ ID NO: 36026 - DNA, 41 bp, Emericella nidulans
gaattcactgcggccgccatggccgaagccttgcagcctca

SEQ ID NO: 36027 - DNA, 41 bp, Emericella nidulans
gttctcgagacgagcgatcgcgggcccataaggcggctgtc

SEQ ID NO: 36028 - DNA, 41 bp, Emericella nidulans
gaattcactgcggccgccatgggtttgcacccgcccatctg

SEQ ID NO: 36029 - DNA, 46 bp, Emericella nidulans
gttctcgagacgagcgatcgcatatcaaccagcttcggcttcatct

SEQ ID NO: 36030 - DNA, 53 bp, Emericella nidulans
gaattcactgcggccgccatgttactggaaattcacaatgaggacaaaacagc

SEQ ID NO: 36031 - DNA, 54 bp, Emericella nidulans
gttctcgagacgagcgatcgcaaaacattcccctacagtgtaacatggcagctt

SEQ ID NO: 36032 - DNA, 45 bp, Emericella nidulans
gaattcactgcggccgccatggatgcgggacggtaaggaacatca

SEQ ID NO: 36033 - DNA, 42 bp, Emericella nidulans
gttctcgagacgagcgatcgccgccggtgaccttttcaatgc

SEQ ID NO: 36034 - DNA, 41 bp, Emericella nidulans
gaattcactgcggccgccatgcccatcccctcgccatcctc

SEQ ID NO: 36035 - DNA, 45 bp, Emericella nidulans
gttctcgagacgagcgatcgcggcagttcgacagcactcggattt

SEQ ID NO: 36036 - DNA, 44 bp, Emericella nidulans
gaattcactgcggccgccatgcacgccgatattgaatccgacga

SEQ ID NO: 36037 - DNA, 42 bp, Emericella nidulans
gttctcgagacgagcgatcgcgccaggccgaggggctctagt

SEQ ID NO: 36038 - DNA, 41 bp, Emericella nidulans
gaattcactgcggccgccatgggggcttcctcaggcccgta

SEQ ID NO: 36039 - DNA, 43 bp, Emericella nidulans
gttctcgagacgagcgatcgctccatcctttgcccactcacga

SEQ ID NO: 36040 - DNA, 43 bp, Emericella nidulans
gaattcactgcggccgccatgtcccaaccaccttttccccctc

SEQ ID NO: 36041 - DNA, 41 bp, Emericella nidulans
gttctcgagacgagcgatcgccaggtccggtctcgcctggt

SEQ ID NO: 36042 - DNA, 41 bp, Emericella nidulans
gaattcactgcggccgccatgtttcggcccgggtgaagtcc

SEQ ID NO: 36043 - DNA, 42 bp, Emericella nidulans
gttctcgagacgagcgatcgcggagccgaatgacgaggaggc

SEQ ID NO: 36044 - DNA, 45 bp, Emericella nidulans
gaattcactgcggccgccatgcctgcataaccctccagagccaga

SEQ ID NO: 36045 - DNA, 46 bp, Emericella nidulans
gttctcgagacgagcgatcgcctcgttcttctccattgagggctga

SEQ ID NO: 36046 - DNA, 57 bp, Emericella nidulans
gaattcactgcggccgccatgctaaccattggaatatattctaggatttatgaggag

SEQ ID NO: 36047 - DNA, 49 bp, Emericella nidulans
gttctcgagacgagcgatcgcggccgttagcatgtattcaaacatcagc

SEQ ID NO: 36048 - DNA, 42 bp, Emericella nidulans
gaattcactgcggccgccatggggcggtttctaggtggttca

SEQ ID NO: 36049 - DNA, 41 bp, Emericella nidulans
gttctcgagacgagcgatcgccgccgcaaagacaaggcacc

SEQ ID NO: 36050 - DNA, 41 bp, Emericella nidulans
gaattcactgcggccgccatgcataaccggggccaggacca

SEQ ID NO: 36051 - DNA, 46 bp, Emericella nidulans
gttctcgagacgagcgatcgcaattagcatacaccgctgcaacaga

SEQ ID NO: 36052 - DNA, 44 bp, Emericella nidulans
gaattcactgcggccgccatgtgccagtcgtcaaaggaggtgtc

SEQ ID NO: 36053 - DNA, 42 bp, Emericella nidulans
gttctcgagacgagcgatcgccgcgtcctcttcgtcgtcgtc

SEQ ID NO: 36054 - DNA, 57 bp, Emericella nidulans
gaattcactgcggccgccatgtgtttttatctattcttttcatcagctactacatcc

SEQ ID NO: 36055 - DNA, 41 bp, Emericella nidulans
gttctcgagacgagcgatcgctgcggtgcaggcacttacgc

SEQ ID NO: 36056 - DNA, 41 bp, Emericella nidulans
gaattcactgcggccgccatgaccatgggagacgccccaaa

SEQ ID NO: 36057 - DNA, 48 bp, Emericella nidulans
gttctcgagacgagcgatcgccaacaacactgagcagcgaatactcaa

SEQ ID NO: 36058 - DNA, 41 bp, Emericella nidulans
gaattcactgcggccgccatgttccgacaggtggtccgaca

SEQ ID NO: 36059 - DNA, 41 bp, Emericella nidulans
gttctcgagacgagcgatcgcaatgggccgctgcgagacac

SEQ ID NO: 36060 - DNA, 41 bp, Emericella nidulans
gaattcactgcggccgccatggttccgcgacgactcccacc

SEQ ID NO: 36061 - DNA, 43 bp, Emericella nidulans
gttctcgagacgagcgatcgctccttcaaacgagcgaaggtca

SEQ ID NO: 36062 - DNA, 41 bp, Emericella nidulans
gaattcactgcggccgccatggtgggggaaggctggggaga

SEQ ID NO: 36063 - DNA, 39 bp, Emericella nidulans
gttctcgagacgagcgatcgccgccacgcgggtctcaaa

SEQ ID NO: 36064 - DNA, 45 bp, Emericella nidulans
gaattcactgcggccgccatgtccgcacttttctccggagtcttg

SEQ ID NO: 36065 - DNA, 48 bp, Emericella nidulans
gttctcgagacgagcgatcgcgacgccatatgttgcactattgagatt

SEQ ID NO: 36066 - DNA, 41 bp, Emericella nidulans
gaattcactgcggccgccatgcccggctggttcgaccttga

SEQ ID NO: 36067 - DNA, 41 bp, Emericella nidulans
gttctcgagacgagcgatcgctgcagacgcaggctctgtgg

SEQ ID NO: 36068 - DNA, 51 bp, Emericella nidulans
gaattcactgcggccgccatgtttaaaggatgacattttgacaccatgcag

SEQ ID NO: 36069 - DNA, 41 bp, Emericella nidulans
gttctcgagacgagcgatcgccgcgccggctgagtcaattc

SEQ ID NO: 36070 - DNA, 44 bp, Emericella nidulans
gaattcactgcggccgccatgcgccctctttgtcgtctccgtct

SEQ ID NO: 36071 - DNA, 41 bp, Emericella nidulans
gttctcgagacgagcgatcgctgccgtcgtatggccgggta

SEQ ID NO: 36072 - DNA, 41 bp, Emericella nidulans
gaattcactgcggccgccatggccgctaccccaccgtagcc

SEQ ID NO: 36073 - DNA, 41 bp, Emericella nidulans
gttctcgagacgagcgatcgccctcgcagcctcatcgtcca

SEQ ID NO: 36074 - DNA, 41 bp, Emericella nidulans
gaattcactgcggccgccatgcactccccgcaccatcccac

SEQ ID NO: 36075 - DNA, 43 bp, Emericella nidulans
gttctcgagacgagcgatcgcggcactctttgctgcttggaca

SEQ ID NO: 36076 - DNA, 42 bp, Emericella nidulans
gaattcactgcggccgccatggggggcaaaagcagcgaattg

SEQ ID NO: 36077 - DNA, 41 bp, Emericella nidulans
gttctcgagacgagcgatcgctgccagaccggcaacaagca

SEQ ID NO: 36078 - DNA, 48 bp, Emericella nidulans
gaattcactgcggccgccatgaatatgcgcgctaagatcaagaaagtt

SEQ ID NO: 36079 - DNA, 48 bp, Emericella nidulans
gttctcgagacgagcgatcgcgttgaaattagagagtcgtgcagttcg

SEQ ID NO: 36080 - DNA, 50 bp, Emericella nidulans
gaattcactgcggccgccatgaccatgaacgaataactaaaatgcggttg

SEQ ID NO: 36081 - DNA, 47 bp, Emericella nidulans
gttctcgagacgagcgatcgcccccaagtaaataaaggcgtggttcg

SEQ ID NO: 36082 - DNA, 41 bp, Emericella nidulans
gaattcactgcggccgccatgcagggggagcggcttcggta

SEQ ID NO: 36083 - DNA, 43 bp, Emericella nidulans
gttctcgagacgagcgatcgcgcgacacctaacatcgtcagca

SEQ ID NO: 36084 - DNA, 52 bp, Emericella nidulans
gaattcactgcggccgccatgaatcccccgtctcctctaaacttactcttgg

SEQ ID NO: 36085 - DNA, 41 bp, Emericella nidulans
gttctcgagacgagcgatcgcgcgccgctgcgagaagagat

SEQ ID NO: 36086 - DNA, 53 bp, Emericella nidulans
gaattcactgcggccgccatgagcttctcaaaattaacacttgaacatactgc

SEQ ID NO: 36087 - DNA, 41 bp, Emericella nidulans; identical to SEQ ID NO: 35825

SEQ ID NO: 36088 - DNA, 44 bp, Emericella nidulans
gaattcactgcggccgccatgtctcacctggttggggaactgga

SEQ ID NO: 36089 - DNA, 45 bp, Emericella nidulans
gttctcgagacgagcgatcgcgggtggcatatgcaccgtataccc

SEQ ID NO: 36090 - DNA, 44 bp, Emericella nidulans
gaattcactgcggccgccatgttttctcctgacgcctgctcttt

SEQ ID NO: 36091 - DNA, 51 bp, Emericella nidulans
gttctcgagacgagcgatcgcgctccgtcgatcgatattaaagcttgagac

SEQ ID NO: 36092 - DNA, 42 bp, Emericella nidulans
gaattcactgcggccgccatgcaaagcccggctctcgctacc

SEQ ID NO: 36093 - DNA, 40 bp, Emericella nidulans
gttctcgagacgagcgatcgcccgattcgccggacgtcaa

SEQ ID NO: 36094 - DNA, 44 bp, Emericella nidulans
gaattcactgcggccgccatgccgataacaccgaagagcctggt

SEQ ID NO: 36095 - DNA, 41 bp, Emericella nidulans
gttctcgagacgagcgatcgcttgggacgccacccgttacc

SEQ ID NO: 36096 - DNA, 45 bp, Emericella nidulans
gaattcactgcggccgccatgcggtgaacgacttcttggcagtcc

SEQ ID NO: 36097 - DNA, 45 bp, Emericella nidulans
gttctcgagacgagcgatcgcccaaaacaaggcatccgactcgac

SEQ ID NO: 36098 - DNA, 42 bp, Emericella nidulans
gaattcactgcggccgccatgcatggtcgacggttgcgatca

SEQ ID NO: 36099 - DNA, 43 bp, Emericella nidulans
gttctcgagacgagcgatcgccggctgcagtaaaggtggtgcc

SEQ ID NO: 36100 - DNA, 42 bp, Emericella nidulans
gaattcactgcggccgccatgcgcccaaggagaaggccaaga

SEQ ID NO: 36101 - DNA, 47 bp, Emericella nidulans
gttctcgagacgagcgatcgctcaatttcgacattttcaccgaacca

SEQ ID NO: 36102 - DNA, 41 bp, Emericella nidulans
gaattcactgcggccgccatgcgacgccggattcggatcat

SEQ ID NO: 36103 - DNA, 57 bp, Emericella nidulans
gttctcgagacgagcgatcgcaaaaattattaaggcaataagttgttatccaggtgc

SEQ ID NO: 36104 - DNA, 51 bp, Emericella nidulans
gaattcactgcggccgccatgactatcagaatcaagagtcctgggatgtta

SEQ ID NO: 36105 - DNA, 41 bp, Emericella nidulans
gttctcgagacgagcgatcgctgcgctccctatgcggagga

SEQ ID NO: 36106 - DNA, 48 bp, Emericella nidulans
gaattcactgcggccgccatgtttttcccaaatcttcttctttggtgg

SEQ ID NO: 36107 - DNA, 42 bp, Emericella nidulans
gttctcgagacgagcgatcgccgccccaaactgtggcgtaca

SEQ ID NO: 36108 - DNA, 41 bp, Emericella nidulans
gaattcactgcggccgccatgccgacgccggtcctgtttca

SEQ ID NO: 36109 - DNA, 42 bp, Emericella nidulans
gttctcgagacgagcgatcgctgaggaggccgaatcgaagga

SEQ ID NO: 36110 - DNA, 47 bp, Emericella nidulans
gaattcactgcggccgccatgacaaaacttcaacgggcagaacaagg

SEQ ID NO: 36111 - DNA, 47 bp, Emericella nidulans
gttctcgagacgagcgatcgcaaaggagatccgtcctcataacttcg

SEQ ID NO: 36112 - DNA, 40 bp, Emericella nidulans
gaattcactgcggccgccatgcgctctggaccgcccgtct

SEQ ID NO: 36113 - DNA, 48 bp, Emericella nidulans; identical to SEQ ID NO: 35599

SEQ ID NO: 36114 - DNA, 57 bp, Emericella nidulans
gaattcactgcggccgccatgaaaatgacaaaatagtactcaaactatgacgctatc

SEQ ID NO: 36115 - DNA, 41 bp, Emericella nidulans
gttctcgagacgagcgatcgcgccatcgggcacccggttag

SEQ ID NO: 36116 - DNA, 50 bp, Emericella nidulans
gaattcactgcggccgccatggaaagctcccttagatttttggcttctga

SEQ ID NO: 36117 - DNA, 41 bp, Emericella nidulans
gttctcgagacgagcgatcgcgcatctgcctgtgcgttcca

SEQ ID NO: 36118 - DNA, 41 bp, Emericella nidulans
gaattcactgcggccgccatgtcatcatctgcggcggaggc

SEQ ID NO: 36119 - DNA, 49 bp, Emericella nidulans
gttctcgagacgagcgatcgccaacctagcaagattcaaaaactctcca

SEQ ID NO: 36120 - DNA, 57 bp, Emericella nidulans
gaattcactgcggccgccatgattgaattgaataaaataagactgttgataagagca

SEQ ID NO: 36121 - DNA, 41 bp, Emericella nidulans
gttctcgagacgagcgatcgctgggccgaagtctcatgacc

SEQ ID NO: 36122 - DNA, 42 bp, Emericella nidulans
gaattcactgcggccgccatgtcgccaaccattaaccgtgcc

SEQ ID NO: 36123 - DNA, 50 bp, Emericella nidulans
gttctcgagacgagcgatcgcagcaaagttatcagatcggtcaacccaaa

SEQ ID NO: 36124 - DNA, 43 bp, Emericella nidulans
gaattcactgcggccgccatgtccgaggcaagattccctggtt

SEQ ID NO: 36125 - DNA, 43 bp, Emericella nidulans
gttctcgagacgagcgatcgctcattagcattggccccgacct

SEQ ID NO: 36126 - DNA, 41 bp, Emericella nidulans
gaattcactgcggccgccatggcttgctccgcctgctggtc

SEQ ID NO: 36127 - DNA, 43 bp, Emericella nidulans
gttctcgagacgagcgatcgcccaacgaagttgcacctggcac

SEQ ID NO: 36128 - DNA, 47 bp, Emericella nidulans
gaattcactgcggccgccatgcgagagatccaggagtcattgtaggg

SEQ ID NO: 36129 - DNA, 41 bp, Emericella nidulans
gttctcgagacgagcgatcgccggcgcggaattggtcgata

SEQ ID NO: 36130 - DNA, 56 bp, Emericella nidulans
gaattcactgcggccgccatgccttacaataaatattcgtttgaagagctccgact

SEQ ID NO: 36131 - DNA, 41 bp, Emericella nidulans
gttctcgagacgagcgatcgcacacccatgtgccggtctcg

SEQ ID NO: 36132 - DNA, 56 bp, Emericella nidulans; identical to SEQ ID NO: 36130

SEQ ID NO: 36133 - DNA, 41 bp, Emericella nidulans; identical to SEQ ID NO: 36131

SEQ ID NO: 36134 - DNA, 54 bp, Emericella nidulans
gaattcactgcggccgccatgtaaaagtctgcctggtagtgatagaggatcacc

SEQ ID NO: 36135 - DNA, 41 bp, Emericella nidulans
gttctcgagacgagcgatcgcggcttgccatcgtgccgaac

SEQ ID NO: 36136 - DNA, 41 bp, Emericella nidulans
gaattcactgcggccgccatgtggtggcagcgatgaggaca

SEQ ID NO: 36137 - DNA, 41 bp, Emericella nidulans
gttctcgagacgagcgatcgcaacggcgcaggcttggtgag

SEQ ID NO: 36138 - DNA, 45 bp, Emericella nidulans
gaattcactgcggccgccatggcgtcctcggttcgatagtctcgt

SEQ ID NO: 36139 - DNA, 45 bp, Emericella nidulans
gttctcgagacgagcgatcgcctcacaaatgctgcaatacgcact

SEQ ID NO: 36140 - DNA, 47 bp, Emericella nidulans
gaattcactgcggccgccatgtggaagcacttcaagtattgcgaggc

SEQ ID NO: 36141 - DNA, 53 bp, Emericella nidulans
gttctcgagacgagcgatcgcgttcatatacctctgctgtctccaccgcatac

SEQ ID NO: 36142 - DNA, 43 bp, Emericella nidulans
gaattcactgcggccgccatgggccttccaacagggaaaagac

SEQ ID NO: 36143 - DNA, 41 bp, Emericella nidulans
gttctcgagacgagcgatcgcgggacgctcgactggcttgg

SEQ ID NO: 36144 - DNA, 41 bp, Emericella nidulans
gaattcactgcggccgccatgcgacgccgacggctgatacc

SEQ ID NO: 36145 - DNA, 41 bp, Emericella nidulans
gttctcgagacgagcgatcgctagtgcgagcgcgcattttg

SEQ ID NO: 36146 - DNA, 43 bp, Emericella nidulans
gaattcactgcggccgccatgtcgctatcattggcagcggttg

SEQ ID NO: 36147 - DNA, 44 bp, Emericella nidulans
gttctcgagacgagcgatcgccccgcgctttatcaattcattcc

SEQ ID NO: 36148 - DNA, 41 bp, Emericella nidulans
gaattcactgcggccgccatgcgaccggtgtgaccgtgctc

SEQ ID NO: 36149 - DNA, 50 bp, Emericella nidulans
gttctcgagacgagcgatcgcgccctccctttctcatagtttagtcaccc

SEQ ID NO: 36150 - DNA, 50 bp, Emericella nidulans
gaattcactgcggccgccatgcgacgaagtgactcaccatcagtagttga

SEQ ID NO: 36151 - DNA, 41 bp, Emericella nidulans
gttctcgagacgagcgatcgccgcggaaaacagggcgaaag

SEQ ID NO: 36152 - DNA, 43 bp, Emericella nidulans
gaattcactgcggccgccatgttcagaccctggccagaccacc

SEQ ID NO: 36153 - DNA, 52 bp, Emericella nidulans
gttctcgagacgagcgatcgccttctcttctttccagaacatgtcaacaaca

SEQ ID NO: 36154 - DNA, 41 bp, Emericella nidulans
gaattcactgcggccgccatgcacgccgttctcccccagac

SEQ ID NO: 36155 - DNA, 48 bp, Emericella nidulans
gttctcgagacgagcgatcgctccaagttgctgctttgtttcaaaagg

SEQ ID NO: 36156 - DNA, 41 bp, Emericella nidulans
gaattcactgcggccgccatgatcgccggcagcctcatcac

SEQ ID NO: 36157 - DNA, 54 bp, Emericella nidulans
gttctcgagacgagcgatcgctgctctttcgtagggatggatatagtaagtacg

SEQ ID NO: 36158 - DNA, 48 bp, Emericella nidulans
gaattcactgcggccgccatgtgtcggtctacctagacgccactatgc

SEQ ID NO: 36159 - DNA, 41 bp, Emericella nidulans
gttctcgagacgagcgatcgccggacctcccagccctcaga

SEQ ID NO: 36160 - DNA, 47 bp, Emericella nidulans
gaattcactgcggccgccatgcgggcctttacacaggaagatttaga

SEQ ID NO: 36161 - DNA, 49 bp, Emericella nidulans
gttctcgagacgagcgatcgccaacaaaggtaacttggtccaggccatt

SEQ ID NO: 36162 - DNA, 41 bp, Emericella nidulans
gaattcactgcggccgccatgcacgcacagcccagcgaatc

SEQ ID NO: 36163 - DNA, 47 bp, Emericella nidulans
gttctcgagacgagcgatcgccggctcgtctttcatattccattcca

SEQ ID NO: 36164 - DNA, 44 bp, Emericella nidulans
gaattcactgcggccgccatgtccccgagtccattactcagcct

SEQ ID NO: 36165 - DNA, 41 bp, Emericella nidulans
gttctcgagacgagcgatcgccccgtcgatctccccggtct

SEQ ID NO: 36166 - DNA, 42 bp, Emericella nidulans
gaattcactgcggccgccatgccggggacgagtctggactga

SEQ ID NO: 36167 - DNA, 48 bp, Emericella nidulans
gttctcgagacgagcgatcgccgcaatagctgtcttcctagtcgaagc

SEQ ID NO: 36168 - DNA, 41 bp, Emericella nidulans
gaattcactgcggccgccatggtccgccctcggaagctcct

SEQ ID NO: 36169 - DNA, 41 bp, Emericella nidulans
gttctcgagacgagcgatcgccggggttggctccaggcata

SEQ ID NO: 36170 - DNA, 45 bp, Emericella nidulans
gaattcactgcggccgccatggcttgcgctaatcaaaaccgacga

SEQ ID NO: 36171 - DNA, 53 bp, Emericella nidulans
gttctcgagacgagcgatcgcattcagaatcaatatcctcaccctcctcttcc

SEQ ID NO: 36172 - DNA, 40 bp, Emericella nidulans
gaattcactgcggccgccatgcggcctggtcgctgactcg

SEQ ID NO: 36173 - DNA, 41 bp, Emericella nidulans
gttctcgagacgagcgatcgccgcgcgctccatttcccaat

SEQ ID NO: 36174 - DNA, 43 bp, Emericella nidulans
gaattcactgcggccgccatgtcctcctcccagccgtatgcaa

SEQ ID NO: 36175 - DNA, 46 bp, Emericella nidulans
gttctcgagacgagcgatcgcgtgttttctctggcgctttttctcc

SEQ ID NO: 36176 - DNA, 43 bp, Emericella nidulans
gaattcactgcggccgccatgctcgtggctctggcatctgctg

SEQ ID NO: 36177 - DNA, 46 bp, Emericella nidulans
gttctcgagacgagcgatcgcgctagtaagggcagacgcctcgcta

SEQ ID NO: 36178 - DNA, 55 bp, Emericella nidulans
gaattcactgcggccgccatgcagtctatccatcttactgaagccctcagctggt

SEQ ID NO: 36179 - DNA, 41 bp, Emericella nidulans
gttctcgagacgagcgatcgccgggtccgccatggtcaagt

SEQ ID NO: 36180 - DNA, 44 bp, Emericella nidulans
gaattcactgcggccgccatgcccaagcgatacgcatttgtgga

SEQ ID NO: 36181 - DNA, 45 bp, Emericella nidulans
gttctcgagacgagcgatcgctgcaacgatgaagaagacctacca

SEQ ID NO: 36182 - DNA, 43 bp, Emericella nidulans
gaattcactgcggccgccatgggaggaatggcatcagcgccta

SEQ ID NO: 36183 - DNA, 48 bp, Emericella nidulans
gttctcgagacgagcgatcgcaaaatattaatcatcgttgcggagacc

SEQ ID NO: 36184 - DNA, 42 bp, Emericella nidulans
gaattcactgcggccgccatgccatcagctcgctgggcagtc

SEQ ID NO: 36185 - DNA, 40 bp, Emericella nidulans
gttctcgagacgagcgatcgccgccggtatctgccgcatc

SEQ ID NO: 36186 - DNA, 48 bp, Emericella nidulans
gaattcactgcggccgccatgcctgatcgctaggataatccccagctt

SEQ ID NO: 36187 - DNA, 41 bp, Emericella nidulans
gttctcgagacgagcgatcgctccgctggcctcgcagatta

SEQ ID NO: 36188 - DNA, 43 bp, Emericella nidulans
gaattcactgcggccgccatgtgctgaagcatttcgacgtcac

SEQ ID NO: 36189 - DNA, 41 bp, Emericella nidulans
gttctcgagacgagcgatcgccgtggatgcagagcgcgaca

SEQ ID NO: 36190 - DNA, 40 bp, Emericella nidulans
gaattcactgcggccgccatgcgcaggcccgatcgctgtt

SEQ ID NO: 36191 - DNA, 43 bp, Emericella nidulans
gttctcgagacgagcgatcgcgccgttgtcgttgtcggtttca

SEQ ID NO: 36192 - DNA, 41 bp, Emericella nidulans
gaattcactgcggccgccatgccccacccgtggaccaaaca

SEQ ID NO: 36193 - DNA, 41 bp, Emericella nidulans
gttctcgagacgagcgatcgcttgccgcaggtgcagctctc

SEQ ID NO: 36194 - DNA, 41 bp, Emericella nidulans
gaattcactgcggccgccatgtgccaccccagcctttctcc

SEQ ID NO: 36195 - DNA, 47 bp, Emericella nidulans
gttctcgagacgagcgatcgcgctgctcgtattctcgtagtcgtgcc

SEQ ID NO: 36196 - DNA, 51 bp, Emericella nidulans
gaattcactgcggccgccatgctatatccgatctctcctcccagttcttcc

SEQ ID NO: 36197 - DNA, 43 bp, Emericella nidulans
gttctcgagacgagcgatcgcggtcctcagcggtcacctcgaa

SEQ ID NO: 36198 - DNA, 52 bp, Emericella nidulans
gaattcactgcggccgccatgatgatatataaagtcctgcctcgtgctcaac

SEQ ID NO: 36199 - DNA, 50 bp, Emericella nidulans
gttctcgagacgagcgatcgccgaaggatatcctcaaagagaacatgcag

SEQ ID NO: 36200 - DNA, 45 bp, Emericella nidulans
gaattcactgcggccgccatgagcctttctttccacccgtccttc

SEQ ID NO: 36201 - DNA, 51 bp, Emericella nidulans
gttctcgagacgagcgatcgcgtacggaaaactaaatgaacccttgggaca

SEQ ID NO: 36202 - DNA, 42 bp, Emericella nidulans
gaattcactgcggccgccatgcgacgcctgtgctcgagaatg

SEQ ID NO: 36203 - DNA, 41 bp, Emericella nidulans
gttctcgagacgagcgatcgcatacagcagccggcccgtca

SEQ ID NO: 36204 - DNA, 41 bp, Emericella nidulans
gaattcactgcggccgccatggacacgctcggcgacctcct

SEQ ID NO: 36205 - DNA, 43 bp, Emericella nidulans
gttctcgagacgagcgatcgctcgacgtcagggagagccattg

SEQ ID NO: 36206 - DNA, 42 bp, Emericella nidulans
gaattcactgcggccgccatgtgcctggttatcgcccacgtt

SEQ ID NO: 36207 - DNA, 40 bp, Emericella nidulans
gttctcgagacgagcgatcgcgcgcatgacctgccggaaa

SEQ ID NO: 36208 - DNA, 41 bp, Emericella nidulans
gaattcactgcggccgccatggcggtctgaacggcgctctc

SEQ ID NO: 36209 - DNA, 41 bp, Emericella nidulans
gttctcgagacgagcgatcgcggcttgtcccgctggctgat

SEQ ID NO: 36210 - DNA, 45 bp, Emericella nidulans
gaattcactgcggccgccatgttcaacgagctctcaaccatgtgc

SEQ ID NO: 36211 - DNA, 52 bp, Emericella nidulans
gttctcgagacgagcgatcgcaaaatgtaggtaaatggccaatgcatattcg

SEQ ID NO: 36212 - DNA, 41 bp, Emericella nidulans
gaattcactgcggccgccatgccgtcagattccgccgacga

SEQ ID NO: 36213 - DNA, 41 bp, Emericella nidulans
gttctcgagacgagcgatcgcgcgggtggactgactggtgg

SEQ ID NO: 36214 - DNA, 55 bp, Emericella nidulans
gaattcactgcggccgccatgacggcctttcagatatcatctatcaaaatgcaca

SEQ ID NO: 36215 - DNA, 57 bp, Emericella nidulans
gttctcgagacgagcgatcgcaattgtcctgtaaaagtttaataacagggccgagca

SEQ ID NO: 36216 - DNA, 41 bp, Emericella nidulans
gaattcactgcggccgccatgccacgcgcacatgaccgtct

SEQ ID NO: 36217 - DNA, 41 bp, Emericella nidulans
gttctcgagacgagcgatcgccccgctcaacggtctcctcc

SEQ ID NO: 36218 - DNA, 53 bp, Emericella nidulans
gaattcactgcggccgccatgtataacgctcttaaaacgtgtgctgtctttgc

SEQ ID NO: 36219 - DNA, 41 bp, Emericella nidulans
gttctcgagacgagcgatcgcgctcaacgctcgccgtttcg

SEQ ID NO: 36220 - DNA, 41 bp, Emericella nidulans
gaattcactgcggccgccatgccctcgatgggcctgctcaa

SEQ ID NO: 36221 - DNA, 41 bp, Emericella nidulans
gttctcgagacgagcgatcgcgcgccgcttgaaaagccaaa

SEQ ID NO: 36222 - DNA, 45 bp, Emericella nidulans
gaattcactgcggccgccatgccgacggtggtaccagcttatggt

SEQ ID NO: 36223 - DNA, 43 bp, Emericella nidulans
gttctcgagacgagcgatcgcgtctcctccgaggcaatcttca

SEQ ID NO: 36224 - DNA, 43 bp, Emericella nidulans; identical to SEQ ID NO: 33994

SEQ ID NO: 36225 - DNA, 42 bp, Emericella nidulans
gttctcgagacgagcgatcgctgtcgcttttccccctgctcc

SEQ ID NO: 36226 - DNA, 43 bp, Emericella nidulans
gaattcactgcggccgccatgtgccgtagcgaagactggctca

SEQ ID NO: 36227 - DNA, 42 bp, Emericella nidulans
gttctcgagacgagcgatcgcggcgcttcctgatcagcacct

SEQ ID NO: 36228 - DNA, 44 bp, Emericella nidulans
gaattcactgcggccgccatgtgtacgtcaacccaaatgcacga

SEQ ID NO: 36229 - DNA, 41 bp, Emericella nidulans
gttctcgagacgagcgatcgccggccaccctcacggatgtt

SEQ ID NO: 36230 - DNA, 44 bp, Emericella nidulans
gaattcactgcggccgccatgtcgccatccacgtttctaggtga

SEQ ID NO: 36231 - DNA, 41 bp, Emericella nidulans
gttctcgagacgagcgatcgctggctgcgttgaatgccaag

SEQ ID NO: 36232 - DNA, 41 bp, Emericella nidulans
gaattcactgcggccgccatgttgcgcccttgcccaacatt

SEQ ID NO: 36233 - DNA, 44 bp, Emericella nidulans
gttctcgagacgagcgatcgctgcatagggcgtagcgcgtaaca

SEQ ID NO: 36234 - DNA, 41 bp, Emericella nidulans
gaattcactgcggccgccatgcaggctgcgcgaagaaggga

SEQ ID NO: 36235 - DNA, 42 bp, Emericella nidulans
gttctcgagacgagcgatcgcgcccataccccttccggccta

SEQ ID NO: 36236 - DNA, 49 bp, Emericella nidulans
gaattcactgcggccgccatgaagtcattggaacaagaagcaacgtttt

SEQ ID NO: 36237 - DNA, 48 bp, Emericella nidulans
gttctcgagacgagcgatcgccatccaacttagactcgacttcctcgt

SEQ ID NO: 36238 - DNA, 52 bp, Emericella nidulans
gaattcactgcggccgccatggttcatcgactgtagatctctttgaagtcgt

SEQ ID NO: 36239 - DNA, 41 bp, Emericella nidulans
gttctcgagacgagcgatcgcgcggctgtctgccaacgaga

SEQ ID NO: 36240 - DNA, 41 bp, Emericella nidulans
gaattcactgcggccgccatgctcgcgagtgctgcgagtgc

SEQ ID NO: 36241 - DNA, 41 bp, Emericella nidulans
gttctcgagacgagcgatcgcggtgcgagctccagtggtgg

SEQ ID NO: 36242 - DNA, 46 bp, Emericella nidulans
gaattcactgcggccgccatgagtggtgtgagtgtttgtgctgaga

SEQ ID NO: 36243 - DNA, 42 bp, Emericella nidulans
gttctcgagacgagcgatcgccgcctgcgaaacatcccacat

SEQ ID NO: 36244 - DNA, 41 bp, Emericella nidulans
gaattcactgcggccgccatgtccgtcagagctcggccatc

SEQ ID NO: 36245 - DNA, 57 bp, Emericella nidulans
gttctcgagacgagcgatcgcgtatcatagaattctttactctgatctcaccccctc

SEQ ID NO: 36246 - DNA, 40 bp, Emericella nidulans
gaattcactgcggccgccatggccccggcactcaggaagg

SEQ ID NO: 36247 - DNA, 44 bp, Emericella nidulans
gttctcgagacgagcgatcgcgctgtggtaccagcaccgagtga

SEQ ID NO: 36248 - DNA, 40 bp, Emericella nidulans
gaattcactgcggccgccatgcccggaagctccgcaggac

SEQ ID NO: 36249 - DNA, 43 bp, Emericella nidulans
gttctcgagacgagcgatcgcgacagaatgcgcggatcatctt

SEQ ID NO: 36250 - DNA, 44 bp, Emericella nidulans
gaattcactgcggccgccatggattcagaggaggacccggcatc

SEQ ID NO: 36251 - DNA, 45 bp, Emericella nidulans
gttctcgagacgagcgatcgctccatgagtttcatttcccattcg

SEQ ID NO: 36252 - DNA, 44 bp, Emericella nidulans; identical to SEQ ID NO: 36250

SEQ ID NO: 36253 - DNA, 45 bp, Emericella nidulans; identical to SEQ ID NO: 36251

SEQ ID NO: 36254 - DNA, 41 bp, Emericella nidulans
gaattcactgcggccgccatgacggtgcgtccacccacttg

SEQ ID NO: 36255 - DNA, 47 bp, Emericella nidulans
gttctcgagacgagcgatcgctccctcagcacaataagctgcttgaa

SEQ ID NO: 36256 - DNA, 49 bp, Emericella nidulans
gaattcactgcggccgccatgccgaaaatatatacagacgtgcccatgc

SEQ ID NO: 36257 - DNA, 48 bp, Emericella nidulans
gttctcgagacgagcgatcgctcgacctcatatcgatcatcgtcatcc

SEQ ID NO: 36258 - DNA, 41 bp, Emericella nidulans
gaattcactgcggccgccatgaacgtccgggtggagggagc

SEQ ID NO: 36259 - DNA, 45 bp, Emericella nidulans
gttctcgagacgagcgatcgccaaacccgatgatttaacgcctga

SEQ ID NO: 36260 - DNA, 41 bp, Emericella nidulans
gaattcactgcggccgccatgtcgctacctgcgaggcgatg

SEQ ID NO: 36261 - DNA, 42 bp, Emericella nidulans
gttctcgagacgagcgatcgctcctcaacctgcctggcgaaa

SEQ ID NO: 36262 - DNA, 42 bp, Emericella nidulans
gaattcactgcggccgccatgcgggtgcagctgcttcaaaaa

SEQ ID NO: 36263 - DNA, 53 bp, Emericella nidulans
gttctcgagacgagcgatcgcttatgagtatagtgttcaaagtgctttgggag

SEQ ID NO: 36264 - DNA, 40 bp, Emericella nidulans
gaattcactgcggccgccatgcgggcagcgagccctcatc

SEQ ID NO: 36265 - DNA, 43 bp, Emericella nidulans
gttctcgagacgagcgatcgcgcgtccaagcatggtctcctca

SEQ ID NO: 36266 - DNA, 50 bp, Emericella nidulans
gaattcactgcggccgccatgccctcaaatatacaagtatcgcggctctg

SEQ ID NO: 36267 - DNA, 44 bp, Emericella nidulans
gttctcgagacgagcgatcgctgcaaggaagacggaattcgtga

SEQ ID NO: 36268 - DNA, 44 bp, Emericella nidulans
gaattcactgcggccgccatgcctttcaaacataacggcatcca

SEQ ID NO: 36269 - DNA, 42 bp, Emericella nidulans
gttctcgagacgagcgatcgccaatcctcagcatcccgagcc

SEQ ID NO: 36270 - DNA, 44 bp, Emericella nidulans
gaattcactgcggccgccatggctcctgcatctgcaacctatgc

SEQ ID NO: 36271 - DNA, 41 bp, Emericella nidulans
gttctcgagacgagcgatcgcagcatgtcgcgccctggaag

SEQ ID NO: 36272 - DNA, 41 bp, Emericella nidulans
gaattcactgcggccgccatgcagggaccgggaagggcaac

SEQ ID NO: 36273 - DNA, 41 bp, Emericella nidulans
gttctcgagacgagcgatcgcctcgcgcagagcagccatga

SEQ ID NO: 36274 - DNA, 41 bp, Emericella nidulans
gaattcactgcggccgccatgctcgccgctgcccgctctat

SEQ ID NO: 36275 - DNA, 44 bp, Emericella nidulans
gttctcgagacgagcgatcgccgctcagcttctgctcctggtcc

SEQ ID NO: 36276 - DNA, 44 bp, Emericella nidulans
gaattcactgcggccgccatgtgaccaacagctgcgctttcttg

SEQ ID NO: 36277 - DNA, 42 bp, Emericella nidulans
gttctcgagacgagcgatcgccacccaagccctgacgctcat

SEQ ID NO: 36278 - DNA, 42 bp, Emericella nidulans
gaattcactgcggccgccatgccgagtgcttttggggcttgg

SEQ ID NO: 36279 - DNA, 43 bp, Emericella nidulans
gttctcgagacgagcgatcgctcgctgctgctaggcgtctctg

SEQ ID NO: 36280 - DNA, 46 bp, Emericella nidulans
gaattcactgcggccgccatgcaacacacactcaacgttggcgaag

SEQ ID NO: 36281 - DNA, 53 bp, Emericella nidulans
gttctcgagacgagcgatcgcctcaaaagtgccgatagtagacttaggcgtca

SEQ ID NO: 36282 - DNA, 41 bp, Emericella nidulans
gaattcactgcggccgccatgtggtgcttttggcgcgttca

SEQ ID NO: 36283 - DNA, 45 bp, Emericella nidulans
gttctcgagacgagcgatcgccggccaatattctcgtcgagatcc

SEQ ID NO: 36284 - DNA, 41 bp, Emericella nidulans
gaattcactgcggccgccatgtggttgatcggtgcgagcag

SEQ ID NO: 36285 - DNA, 43 bp, Emericella nidulans
gttctcgagacgagcgatcgcccgtcaacaacctcagccaacg

SEQ ID NO: 36286 - DNA, 42 bp, Emericella nidulans
gaattcactgcggccgccatgtcacccgcatgggtttcaagc

SEQ ID NO: 36287 - DNA, 47 bp, Emericella nidulans
gttctcgagacgagcgatcgctgcaacaaatacccattctcgtcgaa

SEQ ID NO: 36288 - DNA, 54 bp, Emericella nidulans
gaattcactgcggccgccatgtttcctcgatattgacctcaagtactacgacct

SEQ ID NO: 36289 - DNA, 41 bp, Emericella nidulans
gttctcgagacgagcgatcgcacggtccgtgggcagcttca

SEQ ID NO: 36290 - DNA, 41 bp, Emericella nidulans
gaattcactgcggccgccatggccctggggagagcgcctat

SEQ ID NO: 36291 - DNA, 43 bp, Emericella nidulans
gttctcgagacgagcgatcgcgacaggcccacatgctggatga

SEQ ID NO: 36292 - DNA, 41 bp, Emericella nidulans
gaattcactgcggccgccatgcccccgtctcacgcggaata

SEQ ID NO: 36293 - DNA, 48 bp, Emericella nidulans
gttctcgagacgagcgatcgccgccagcttgttatctgagctaccttc

SEQ ID NO: 36294 - DNA, 50 bp, Emericella nidulans
gaattcactgcggccgccatgttccacttctacgtctgcttcagtgaggt

SEQ ID NO: 36295 - DNA, 43 bp, Emericella nidulans
gttctcgagacgagcgatcgctgcgctcaggctatgccagact

SEQ ID NO: 36296 - DNA, 49 bp, Emericella nidulans
gaattcactgcggccgccatggtcctacatcgcatgaacacaactctcg

SEQ ID NO: 36297 - DNA, 46 bp, Emericella nidulans
gttctcgagacgagcgatcgcgcccaaggtcatgtcctcaactctg

SEQ ID NO: 36298 - DNA, 47 bp, Emericella nidulans
gaattcactgcggccgccatgggtcaaggcaatgttgcattggatgt

SEQ ID NO: 36299 - DNA, 42 bp, Emericella nidulans
gttctcgagacgagcgatcgccagagccgccagcatctcctc

SEQ ID NO: 36300 - DNA, 47 bp, Emericella nidulans
gaattcactgcggccgccatggaccatgtctctctgacactccttca

SEQ ID NO: 36301 - DNA, 50 bp, Emericella nidulans
gttctcgagacgagcgatcgcggcgacattagttcactgtttcaatacgg

SEQ ID NO: 36302 - DNA, 41 bp, Emericella nidulans
gaattcactgcggccgccatgtcccacgcctgggattctcg

SEQ ID NO: 36303 - DNA, 41 bp, Emericella nidulans
gttctcgagacgagcgatcgccagctgcggaggctgggcta

SEQ ID NO: 36304 - DNA, 47 bp, Emericella nidulans
gaattcactgcggccgccatgcagacatggcttctgcgatagtcacc

SEQ ID NO: 36305 - DNA, 40 bp, Emericella nidulans
gttctcgagacgagcgatcgcccgcgcagcccatttctca

SEQ ID NO: 36306 - DNA, 43 bp, Emericella nidulans
gaattcactgcggccgccatgcgccggagtcggataacatcca

SEQ ID NO: 36307 - DNA, 41 bp, Emericella nidulans
gttctcgagacgagcgatcgccagcgtcactgtcgcggtca

SEQ ID NO: 36308 - DNA, 41 bp, Emericella nidulans
gaattcactgcggccgccatgcgagcccatcgctaccgtga

SEQ ID NO: 36309 - DNA, 41 bp, Emericella nidulans
gttctcgagacgagcgatcgcgcccgacggcgaatgtcaga

SEQ ID NO: 36310 - DNA, 46 bp, Emericella nidulans
gaattcactgcggccgccatgcttcacaattcacatggcctaagga

SEQ ID NO: 36311 - DNA, 41 bp, Emericella nidulans
gttctcgagacgagcgatcgcatgacagccggggctgatgg

SEQ ID NO: 36312 - DNA, 41 bp, Emericella nidulans
gaattcactgcggccgccatgaccacggcggacacgctttc

SEQ ID NO: 36313 - DNA, 43 bp, Emericella nidulans
gttctcgagacgagcgatcgcgcgccctccttctcattcttcg

SEQ ID NO: 36314 - DNA, 41 bp, Emericella nidulans
gaattcactgcggccgccatggcccgcaagcttgttcctcc

SEQ ID NO: 36315 - DNA, 41 bp, Emericella nidulans
gttctcgagacgagcgatcgctgctcgcccgagtcccaaag

SEQ ID NO: 36316 - DNA, 41 bp, Emericella nidulans
gaattcactgcggccgccatgagtcgccccgctggttgatg

SEQ ID NO: 36317 - DNA, 42 bp, Emericella nidulans
gttctcgagacgagcgatcgctcccggaaccgggataaagca

SEQ ID NO: 36318 - DNA, 41 bp, Emericella nidulans
gaattcactgcggccgccatggatccagccgctcgcatcag

SEQ ID NO: 36319 - DNA, 43 bp, Emericella nidulans
gttctcgagacgagcgatcgccagtctccccattggccggttt

SEQ ID NO: 36320 - DNA, 51 bp, Emericella nidulans
gaattcactgcggccgccatggatatcctatatccaactgcgtgactcctg

SEQ ID NO: 36321 - DNA, 41 bp, Emericella nidulans
gttctcgagacgagcgatcgccggaagcgcgacgctacaac

SEQ ID NO: 36322 - DNA, 41 bp, Emericella nidulans
gaattcactgcggccgccatgtccctcccaaagcggggagt

SEQ ID NO: 36323 - DNA, 50 bp, Emericella nidulans
gttctcgagacgagcgatcgcgtcgtagcgatcatcataacctctgatct

SEQ ID NO: 36324 - DNA, 45 bp, Emericella nidulans
gaattcactgcggccgccatgccgatgctgctctctctcagtgga

SEQ ID NO: 36325 - DNA, 52 bp, Emericella nidulans; identical to SEQ ID NO: 28481

SEQ ID NO: 36326 - DNA, 40 bp, Emericella nidulans
gaattcactgcggccgccatggcgacaccgccgaaggctc

SEQ ID NO: 36327 - DNA, 44 bp, Emericella nidulans
gttctcgagacgagcgatcgctgatccattccaaacgcagtcca

SEQ ID NO: 36328 - DNA, 45 bp, Emericella nidulans
gaattcactgcggccgccatggctgtcgaagcagcactcaagctc

SEQ ID NO: 36329 - DNA, 41 bp, Emericella nidulans
gttctcgagacgagcgatcgcgccgcgcgtcccatttacag

SEQ ID NO: 36330 - DNA, 40 bp, Emericella nidulans
gaattcactgcggccgccatgtggacgcggcccagttcac

SEQ ID NO: 36331 - DNA, 41 bp, Emericella nidulans
gttctcgagacgagcgatcgctttctccctcgggcgtcgtg

SEQ ID NO: 36332 - DNA, 49 bp, Emericella nidulans
gaattcactgcggccgccatgaaatgactgactctagcaacgtgtcgaa

SEQ ID NO: 36333 - DNA, 42 bp, Emericella nidulans
gttctcgagacgagcgatcgccaaagccaaagagcgcggtga

SEQ ID NO: 36334 - DNA, 48 bp, Emericella nidulans
gaattcactgcggccgccatgtgacaacagtggacttgcaaatgatgg

SEQ ID NO: 36335 - DNA, 46 bp, Emericella nidulans
gttctcgagacgagcgatcgctcacacatcctctccttcgacaatg

SEQ ID NO: 36336 - DNA, 46 bp, Emericella nidulans
gaattcactgcggccgccatgggcgtgtcaagtatgatacccagca

SEQ ID NO: 36337 - DNA, 41 bp, Emericella nidulans
gttctcgagacgagcgatcgctggtcggaagaggcgggttg

SEQ ID NO: 36338 - DNA, 41 bp, Emericella nidulans
gaattcactgcggccgccatggggcgccgaccgacaagaag

SEQ ID NO: 36339 - DNA, 41 bp, Emericella nidulans
gttctcgagacgagcgatcgcgcggtgtcccgcttttgcat

SEQ ID NO: 36340 - DNA, 43 bp, Emericella nidulans
gaattcactgcggccgccatgcaatgctcgagcccattcttgc

SEQ ID NO: 36341 - DNA, 45 bp, Emericella nidulans
gttctcgagacgagcgatcgctgtttaacctttgtgtgcggtgcc

SEQ ID NO: 36342 - DNA, 45 bp, Emericella nidulans
gaattcactgcggccgccatgtcaatgagactcaggagggcatcg

SEQ ID NO: 36343 - DNA, 44 bp, Emericella nidulans
gttctcgagacgagcgatcgctcgcttcaactggaggaggcgta

SEQ ID NO: 36344 - DNA, 41 bp, Emericella nidulans
gaattcactgcggccgccatgttgaaccgcgcccatcagag

SEQ ID NO: 36345 - DNA, 48 bp, Emericella nidulans
gttctcgagacgagcgatcgccttaaagcccttctttaacctcctccc

SEQ ID NO: 36346 - DNA, 41 bp, Emericella nidulans
gaattcactgcggccgccatgtctgatgaggtgcgcccaga

SEQ ID NO: 36347 - DNA, 52 bp, Emericella nidulans
gttctcgagacgagcgatcgctgcagagtataatacaaagaccattcatcca

SEQ ID NO: 36348 - DNA, 47 bp, Emericella nidulans
gaattcactgcggccgccatggcgccagcaaagataatacgttaggg

SEQ ID NO: 36349 - DNA, 41 bp, Emericella nidulans
gttctcgagacgagcgatcgcccacgcgaagggacgcaact

SEQ ID NO: 36350 - DNA, 42 bp, Emericella nidulans
gaattcactgcggccgccatgcgatgaagctggcgacgaagc

SEQ ID NO: 36351 - DNA, 46 bp, Emericella nidulans
gttctcgagacgagcgatcgcgcactggtttggaaactctctgtca

SEQ ID NO: 36352 - DNA, 42 bp, Emericella nidulans
gaattcactgcggccgccatgggaggagaagaagcggcagga

SEQ ID NO: 36353 - DNA, 41 bp, Emericella nidulans
gttctcgagacgagcgatcgcccaaaacgccacggagtccc

SEQ ID NO: 36354 - DNA, 41 bp, Emericella nidulans
gaattcactgcggccgccatgcatcgcactcgccggtctgg

SEQ ID NO: 36355 - DNA, 41 bp, Emericella nidulans
gttctcgagacgagcgatcgcgcggatcaacgcgggatcaa

SEQ ID NO: 36356 - DNA, 57 bp, Emericella nidulans
gaattcactgcggccgccatgatgagtttatctgactgtataaagtctcccaagagc

SEQ ID NO: 36357 - DNA, 41 bp, Emericella nidulans
gttctcgagacgagcgatcgctgggctttgcgaacccttgc

SEQ ID NO: 36358 - DNA, 41 bp, Emericella nidulans
gaattcactgcggccgccatgtgccccgtcgatgaatgtgc

SEQ ID NO: 36359 - DNA, 41 bp, Emericella nidulans
gttctcgagacgagcgatcgctgcggacctgcgcattgaga

SEQ ID NO: 36360 - DNA, 41 bp, Emericella nidulans
gaattcactgcggccgccatgtggtggcccggttcttccag

SEQ ID NO: 36361 - DNA, 42 bp, Emericella nidulans
gttctcgagacgagcgatcgctgcttcggggaaccccagatt

SEQ ID NO: 36362 - DNA, 41 bp, Emericella nidulans
gaattcactgcggccgccatgttggcgcgattgctgccttt

SEQ ID NO: 36363 - DNA, 42 bp, Emericella nidulans
gttctcgagacgagcgatcgccggcgcccttattccgcatag

SEQ ID NO: 36364 - DNA, 41 bp, Emericella nidulans
gaattcactgcggccgccatgcgaacggcctggggaactga

SEQ ID NO: 36365 - DNA, 48 bp, Emericella nidulans
gttctcgagacgagcgatcgcgctccatgtaaatgcaaccatatcact

SEQ ID NO: 36366 - DNA, 50 bp, Emericella nidulans
gaattcactgcggccgccatggagcaacacatacctatctcttcgtctgg

SEQ ID NO: 36367 - DNA, 43 bp, Emericella nidulans
gttctcgagacgagcgatcgctgtgcatgaagagggggtgcag

SEQ ID NO: 36368 - DNA, 49 bp, Emericella nidulans
gaattcactgcggccgccatgtcaacttcatggtactttcttgcccaca

SEQ ID NO: 36369 - DNA, 49 bp, Emericella nidulans
gttctcgagacgagcgatcgccatactttgctccattccattctgttcc

SEQ ID NO: 36370 - DNA, 42 bp, Emericella nidulans; identical to SEQ ID NO: 28474

SEQ ID NO: 36371 - DNA, 41 bp, Emericella nidulans
gttctcgagacgagcgatcgcaatcgccgacgggccattct

SEQ ID NO: 36372 - DNA, 42 bp, Emericella nidulans
gaattcactgcggccgccatgtgggctaccctgccagcgagt

SEQ ID NO: 36373 - DNA, 41 bp, Emericella nidulans
gttctcgagacgagcgatcgcatgcaggtccaggggcaacg

SEQ ID NO: 36374 - DNA, 52 bp, Emericella nidulans
gaattcactgcggccgccatggtgtatcacaccagatacgaagtcgtaggga

SEQ ID NO: 36375 - DNA, 43 bp, Emericella nidulans
gttctcgagacgagcgatcgcggcgctccttgatgagcaatcc

SEQ ID NO: 36376 - DNA, 41 bp, Emericella nidulans
gaattcactgcggccgccatggcggatggaaggagccatgc

SEQ ID NO: 36377 - DNA, 49 bp, Emericella nidulans
gttctcgagacgagcgatcgctcccccaagactaaaatcgtggtggtat

SEQ ID NO: 36378 - DNA, 41 bp, Emericella nidulans
gaattcactgcggccgccatgcatgcgcaagcgagccaact

SEQ ID NO: 36379 - DNA, 57 bp, Emericella nidulans
gttctcgagacgagcgatcgcagtagtatcatattcgatgcatagtggttttgccac

SEQ ID NO: 36380 - DNA, 41 bp, Emericella nidulans
gaattcactgcggccgccatgtcggtctccgcatccgaggt

SEQ ID NO: 36381 - DNA, 49 bp, Emericella nidulans
gttctcgagacgagcgatcgccactgttagtgttccagatccaccgagt

SEQ ID NO: 36382 - DNA, 41 bp, Emericella nidulans
gaattcactgcggccgccatgatgtccagcaaggccgcacc

SEQ ID NO: 36383 - DNA, 46 bp, Emericella nidulans
gttctcgagacgagcgatcgcggctatcaagtcgggcaagttctcc

SEQ ID NO: 36384 - DNA, 43 bp, Emericella nidulans
gaattcactgcggccgccatggccctaaacatcgctccgcaag

SEQ ID NO: 36385 - DNA, 41 bp, Emericella nidulans
gttctcgagacgagcgatcgcgcaggccctgttgcggtctt

SEQ ID NO: 36386 - DNA, 41 bp, Emericella nidulans
gaattcactgcggccgccatgcgtcttcgcggtcgagtggt

SEQ ID NO: 36387 - DNA, 41 bp, Emericella nidulans
gttctcgagacgagcgatcgcagttccggggctgtcgctcc

SEQ ID NO: 36388 - DNA, 52 bp, Emericella nidulans
gaattcactgcggccgccatggaacagtccaattttctccacctttacctga

SEQ ID NO: 36389 - DNA, 40 bp, Emericella nidulans
gttctcgagacgagcgatcgctgggttgtcctgctgccac

SEQ ID NO: 36390 - DNA, 43 bp, Emericella nidulans
gaattcactgcggccgccatgtcgtcctccgctgacgagattc

SEQ ID NO: 36391 - DNA, 49 bp, Emericella nidulans
gttctcgagacgagcgatcgcccttgtttcacaagcgctgcagagatac

SEQ ID NO: 36392 - DNA, 49 bp, Emericella nidulans
gaattcactgcggccgccatggcactattgtcggtgcttatcagcttgc

SEQ ID NO: 36393 - DNA, 45 bp, Emericella nidulans
gttctcgagacgagcgatcgctcgacatgctccgagatctgcttg

SEQ ID NO: 36394 - DNA, 41 bp, Emericella nidulans
gaattcactgcggccgccatgcccttggcccgaattgttga

SEQ ID NO: 36395 - DNA, 52 bp, Emericella nidulans
gttctcgagacgagcgatcgccctcaaagctattatcaaagcacggatccac

SEQ ID NO: 36396 - DNA, 41 bp, Emericella nidulans
gaattcactgcggccgccatgcgattcaaaaacgcgcacga

SEQ ID NO: 36397 - DNA, 41 bp, Emericella nidulans
gttctcgagacgagcgatcgcgccgcggcaacgcttacatt

SEQ ID NO: 36398 - DNA, 41 bp, Emericella nidulans
gaattcactgcggccgccatgtggcgcctagacccgcagaa

SEQ ID NO: 36399 - DNA, 42 bp, Emericella nidulans
gttctcgagacgagcgatcgctggcggggtcaagagtttgga

SEQ ID NO: 36400 - DNA, 41 bp, Emericella nidulans
gaattcactgcggccgccatggttccggcgcacgctcagac

SEQ ID NO: 36401 - DNA, 57 bp, Emericella nidulans
gttctcgagacgagcgatcgcaaataaggtgctgggatagtgatgagataataatgg

SEQ ID NO: 36402 - DNA, 41 bp, Emericella nidulans
gaattcactgcggccgccatgtacggaggccgacgagggtg

SEQ ID NO: 36403 - DNA, 49 bp, Emericella nidulans
gttctcgagacgagcgatcgcgactcaccagcaacggagactatttcca

SEQ ID NO: 36404 - DNA, 47 bp, Emericella nidulans
gaattcactgcggccgccatggttatcgacccgagtgactctgacca

SEQ ID NO: 36405 - DNA, 51 bp, Emericella nidulans
gttctcgagacgagcgatcgctgggagcatattgtctcgtaaattgactct

SEQ ID NO: 36406 - DNA, 41 bp, Emericella nidulans
gaattcactgcggccgccatgggcctatctgcggccaaccc

SEQ ID NO: 36407 - DNA, 45 bp, Emericella nidulans
gttctcgagacgagcgatcgcgccggtcaagcgagacttcttgtg

SEQ ID NO: 36408 - DNA, 42 bp, Emericella nidulans
gaattcactgcggccgccatggcacacccacctgcccaaatg

SEQ ID NO: 36409 - DNA, 42 bp, Emericella nidulans
gttctcgagacgagcgatcgccgttcgtctgcacggtcacga

SEQ ID NO: 36410 - DNA, 48 bp, Emericella nidulans
gaattcactgcggccgccatgcgacacttctacaatggaggcaataga

SEQ ID NO: 36411 - DNA, 54 bp, Emericella nidulans
gttctcgagacgagcgatcgcgaatagcctccatgcggttatagttctactcca

SEQ ID NO: 36412 - DNA, 43 bp, Emericella nidulans
gaattcactgcggccgccatgtgttcgcgcctttgatccatga

SEQ ID NO: 36413 - DNA, 41 bp, Emericella nidulans
gttctcgagacgagcgatcgctagatggccggcgcagttgg

SEQ ID NO: 36414 - DNA, 44 bp, Emericella nidulans
gaattcactgcggccgccatgcaaaccgtacgcgttcagccaaa

SEQ ID NO: 36415 - DNA, 41 bp, Emericella nidulans
gttctcgagacgagcgatcgcgcgggttcgaatgggcgagt

SEQ ID NO: 36416 - DNA, 41 bp, Emericella nidulans
gaattcactgcggccgccatggtggtggcatcgggggctta

SEQ ID NO: 36417 - DNA, 47 bp, Emericella nidulans
gttctcgagacgagcgatcgccgtcataaagtcgaagacgctctgga

SEQ ID NO: 36418 - DNA, 54 bp, Emericella nidulans
gaattcactgcggccgccatgaaggagatatatagtgtcaacgtcttcccttca

SEQ ID NO: 36419 - DNA, 41 bp, Emericella nidulans
gttctcgagacgagcgatcgccctgctcctcctcccaccca

SEQ ID NO: 36420 - DNA, 42 bp, Emericella nidulans
gaattcactgcggccgccatgcatccgcatccggatctttcg

SEQ ID NO: 36421 - DNA, 44 bp, Emericella nidulans
gttctcgagacgagcgatcgctggcactcctctcaatcgtctcg

SEQ ID NO: 36422 - DNA, 55 bp, Emericella nidulans
gaattcactgcggccgccatgagatttatgagaaacaggtgaatatgatgcaacg

SEQ ID NO: 36423 - DNA, 40 bp, Emericella nidulans
gttctcgagacgagcgatcgcctgggcggccacagcgata

SEQ ID NO: 36424 - DNA, 45 bp, Emericella nidulans
gaattcactgcggccgccatggccacgttgcgatattaccctccc

SEQ ID NO: 36425 - DNA, 53 bp, Emericella nidulans
gttctcgagacgagcgatcgctgtgttaagttgatatcctaccgcttgtttcc

SEQ ID NO: 36426 - DNA, 50 bp, Emericella nidulans
gaattcactgcggccgccatgcgagactcttctgaccgactggtatatcg

SEQ ID NO: 36427 - DNA, 57 bp, Emericella nidulans
gttctcgagacgagcgatcgcaatacatatgattgtatatgattctggactgctttt

SEQ ID NO: 36428 - DNA, 46 bp, Emericella nidulans
gaattcactgcggccgccatgcccgatcttgttagttgcgcattca

SEQ ID NO: 36429 - DNA, 41 bp, Emericella nidulans
gttctcgagacgagcgatcgccggctcccgcacaggttctc

SEQ ID NO: 36430 - DNA, 40 bp, Emericella nidulans
gaattcactgcggccgccatgggtgggcgcggctatcaat

SEQ ID NO: 36431 - DNA, 41 bp, Emericella nidulans
gttctcgagacgagcgatcgcgggcacgttcacggacctca

SEQ ID NO: 36432 - DNA, 42 bp, Emericella nidulans
gaattcactgcggccgccatgtcgtttgtgcaccccgtgtca

SEQ ID NO: 36433 - DNA, 42 bp, Emericella nidulans
gttctcgagacgagcgatcgccggcgccaatgagtttcccac

SEQ ID NO: 36434 - DNA, 43 bp, Emericella nidulans
gaattcactgcggccgccatgcgcaacacatcccttccgcact

SEQ ID NO: 36435 - DNA, 41 bp, Emericella nidulans
gttctcgagacgagcgatcgcgcccgctttcgtcgcaacat

SEQ ID NO: 36436 - DNA, 41 bp, Emericella nidulans
gaattcactgcggccgccatgtcggtggtctgggcggactt

SEQ ID NO: 36437 - DNA, 43 bp, Emericella nidulans
gttctcgagacgagcgatcgctccacagcggtctttcccgaag

SEQ ID NO: 36438 - DNA, 50 bp, Emericella nidulans
gaattcactgcggccgccatgttaaccggtcaaataatcacgggatgttg

SEQ ID NO: 36439 - DNA, 41 bp, Emericella nidulans
gttctcgagacgagcgatcgccctcacccaagccccaagca

SEQ ID NO: 36440 - DNA, 45 bp, Emericella nidulans
gaattcactgcggccgccatgccttgcgtatgcgtttacttcgtc

SEQ ID NO: 36441 - DNA, 50 bp, Emericella nidulans
gttctcgagacgagcgatcgcctctttctcagaagaacccctaaagcaca

SEQ ID NO: 36442 - DNA, 41 bp, Emericella nidulans
gaattcactgcggccgccatgccacggctttcggtacgtga

SEQ ID NO: 36443 - DNA, 41 bp, Emericella nidulans
gttctcgagacgagcgatcgccggcttctcagccgcaagga

SEQ ID NO: 36444 - DNA, 41 bp, Emericella nidulans
gaattcactgcggccgccatgagacgcagacccggcattgg

SEQ ID NO: 36445 - DNA, 43 bp, Emericella nidulans
gttctcgagacgagcgatcgctgcgagatgaacgtggcaatca

SEQ ID NO: 36446 - DNA, 42 bp, Emericella nidulans
gaattcactgcggccgccatgtcggtcgacgcgctgtcttct

SEQ ID NO: 36447 - DNA, 48 bp, Emericella nidulans
gttctcgagacgagcgatcgctgcagcaactaagccatctcaatctgc

SEQ ID NO: 36448 - DNA, 42 bp, Emericella nidulans
gaattcactgcggccgccatggcctccagatttccccgcagt

SEQ ID NO: 36449 - DNA, 41 bp, Emericella nidulans
gttctcgagacgagcgatcgctccgcccagtccaccaatcc

SEQ ID NO: 36450 - DNA, 45 bp, Emericella nidulans
gaattcactgcggccgccatgcctcgctagcctagccctgcagtt

SEQ ID NO: 36451 - DNA, 41 bp, Emericella nidulans
gttctcgagacgagcgatcgcggtgacggtctccgcgtcaa

SEQ ID NO: 36452 - DNA, 46 bp, Emericella nidulans
gaattcactgcggccgccatggggcatcttcatcatacttgggctc

SEQ ID NO: 36453 - DNA, 44 bp, Emericella nidulans
gttctcgagacgagcgatcgcccgtacatctgccgcagctcttg

SEQ ID NO: 36454 - DNA, 41 bp, Emericella nidulans
gaattcactgcggccgccatgggcccgctttcgccatcttt

SEQ ID NO: 36455 - DNA, 45 bp, Emericella nidulans
gttctcgagacgagcgatcgccgtcgtccttcttctcaccagcct

SEQ ID NO: 36456 - DNA, 47 bp, Emericella nidulans
gaattcactgcggccgccatgtgctctttcacgttactacgcctcca

SEQ ID NO: 36457 - DNA, 43 bp, Emericella nidulans
gttctcgagacgagcgatcgcccttgcgggtagtgccaacagc

SEQ ID NO: 36458 - DNA, 46 bp, Emericella nidulans
gaattcactgcggccgccatgcgcgatcaatatatcccaatcatcg

SEQ ID NO: 36459 - DNA, 49 bp, Emericella nidulans
gttctcgagacgagcgatcgccgctggagaggatttagggtaatagaca

SEQ ID NO: 36460 - DNA, 48 bp, Emericella nidulans
gaattcactgcggccgccatgtgcagtcatactttgacatcaagaggg

SEQ ID NO: 36461 - DNA, 40 bp, Emericella nidulans
gttctcgagacgagcgatcgcccgctgccccagcatggat

SEQ ID NO: 36462 - DNA, 45 bp, Emericella nidulans
gaattcactgcggccgccatgtgcaggtcctggagacaaggaagg

SEQ ID NO: 36463 - DNA, 41 bp, Emericella nidulans
gttctcgagacgagcgatcgcggcgccaggagcgataaccc

SEQ ID NO: 36464 - DNA, 51 bp, Emericella nidulans
gaattcactgcggccgccatgggaattcgatgaagatattgctcacgaagg

SEQ ID NO: 36465 - DNA, 54 bp, Emericella nidulans
gttctcgagacgagcgatcgcctctgcaatctttctactaagcactttcgcaat

SEQ ID NO: 36466 - DNA, 51 bp, Emericella nidulans; identical to SEQ ID NO: 36464

SEQ ID NO: 36467 - DNA, 54 bp, Emericella nidulans; identical to SEQ ID NO: 36465

SEQ ID NO: 36468 - DNA, 45 bp, Emericella nidulans
gaattcactgcggccgccatgggtgttcatgacatgacgccgagt

SEQ ID NO: 36469 - DNA, 42 bp, Emericella nidulans
gttctcgagacgagcgatcgcggctccacccagaggattgaa

SEQ ID NO: 36470 - DNA, 42 bp, Emericella nidulans
gaattcactgcggccgccatgcaccatggtcgctgtcgatgc

SEQ ID NO: 36471 - DNA, 44 bp, Emericella nidulans
gttctcgagacgagcgatcgctgctctcacctcgcttgggaatg

SEQ ID NO: 36472 - DNA, 45 bp, Emericella nidulans
gaattcactgcggccgccatgcatgctttcgactctgggtgtgtg

SEQ ID NO: 36473 - DNA, 41 bp, Emericella nidulans
gttctcgagacgagcgatcgccgcggtcgatgagccaggat

SEQ ID NO: 36474 - DNA, 43 bp, Emericella nidulans
gaattcactgcggccgccatggaaatcccacaaccaccaccca

SEQ ID NO: 36475 - DNA, 44 bp, Emericella nidulans
gttctcgagacgagcgatcgcggcaccggaaagaagaatgggac

SEQ ID NO: 36476 - DNA, 44 bp, Emericella nidulans
gaattcactgcggccgccatgccgtacgtttgccatcgtgcttt

SEQ ID NO: 36477 - DNA, 41 bp, Emericella nidulans
gttctcgagacgagcgatcgcgtgctccggcaagcacaagc

SEQ ID NO: 36478 - DNA, 44 bp, Emericella nidulans
gaattcactgcggccgccatgcgcgcttagagctcagtccgtgt

SEQ ID NO: 36479 - DNA, 41 bp, Emericella nidulans
gttctcgagacgagcgatcgcccccacatgcggacacgttg

SEQ ID NO: 36480 - DNA, 46 bp, Emericella nidulans
gaattcactgcggccgccatgtcttgatttgatccgctcccaagtg

SEQ ID NO: 36481 - DNA, 46 bp, Emericella nidulans
gttctcgagacgagcgatcgccagaatggcccaataaatccccata

SEQ ID NO: 36482 - DNA, 41 bp, Emericella nidulans
gaattcactgcggccgccatgcttcccccagagccccctcc

SEQ ID NO: 36483 - DNA, 46 bp, Emericella nidulans
gttctcgagacgagcgatcgctcattccgtttgtaaaagtcgacca

SEQ ID NO: 36484 - DNA, 43 bp, Emericella nidulans
gaattcactgcggccgccatgggaaaggggcggatgattgagc

SEQ ID NO: 36485 - DNA, 55 bp, Emericella nidulans
gttctcgagacgagcgatcgcaaactcaaattccttccggaatatattgacatcc

SEQ ID NO: 36486 - DNA, 41 bp, Emericella nidulans
gaattcactgcggccgccatgttgacgaggtcgcggcagaa

SEQ ID NO: 36487 - DNA, 45 bp, Emericella nidulans
gttctcgagacgagcgatcgctccagggccaatctagtgcctgtc

SEQ ID NO: 36488 - DNA, 45 bp, Emericella nidulans
gaattcactgcggccgccatgtgcagaagccatcgaagtcaagga

SEQ ID NO: 36489 - DNA, 41 bp, Emericella nidulans
gttctcgagacgagcgatcgcggtcatgcccaccggggtct

SEQ ID NO: 36490 - DNA, 39 bp, Emericella nidulans
gaattcactgcggccgccatggtcgcggcgaatgcgtgt

SEQ ID NO: 36491 - DNA, 41 bp, Emericella nidulans
gttctcgagacgagcgatcgccgcgcggcagtgacaatctc

SEQ ID NO: 36492 - DNA, 47 bp, Emericella nidulans
gaattcactgcggccgccatggccagcgaggtcaactcaactgtacc

SEQ ID NO: 36493 - DNA, 48 bp, Emericella nidulans
gttctcgagacgagcgatcgcaatgtattcgctagacgcttgcagttc

SEQ ID NO: 36494 - DNA, 43 bp, Emericella nidulans
gaattcactgcggccgccatgccagacagcagcgaaacgcaaa

SEQ ID NO: 36495 - DNA, 43 bp, Emericella nidulans
gttctcgagacgagcgatcgctctctgcgcacgaagaacagga

SEQ ID NO: 36496 - DNA, 42 bp, Emericella nidulans
gaattcactgcggccgccatgcggccggttgaatacccctcc

SEQ ID NO: 36497 - DNA, 46 bp, Emericella nidulans
gttctcgagacgagcgatcgcggcaacaacgagcataacgccgaga

SEQ ID NO: 36498 - DNA, 42 bp, Emericella nidulans
gaattcactgcggccgccatgtgcccatgcagaaagggtcag

SEQ ID NO: 36499 - DNA, 44 bp, Emericella nidulans
gttctcgagacgagcgatcgcgcttgttccttactgcggcacca

SEQ ID NO: 36500 - DNA, 44 bp, Emericella nidulans
gaattcactgcggccgccatgtcgtgctctggaccttgacatcg

SEQ ID NO: 36501 - DNA, 41 bp, Emericella nidulans
gttctcgagacgagcgatcgcagcacccagccaagccctct

SEQ ID NO: 36502 - DNA, 50 bp, Emericella nidulans; identical to SEQ ID NO: 36438

SEQ ID NO: 36503 - DNA, 41 bp, Emericella nidulans
gttctcgagacgagcgatcgcgggctgcgccttgaagagga

SEQ ID NO: 36504 - DNA, 54 bp, Emericella nidulans
gaattcactgcggccgccatgcataagttactatacgccaagccaaactatgga

SEQ ID NO: 36505 - DNA, 43 bp, Emericella nidulans
gttctcgagacgagcgatcgccaattgccacctgcccctacca

SEQ ID NO: 36506 - DNA, 56 bp, Emericella nidulans; identical to SEQ ID NO: 35364

SEQ ID NO: 36507 - DNA, 53 bp, Emericella nidulans; identical to SEQ ID NO: 35369

SEQ ID NO: 36508 - DNA, 51 bp, Emericella nidulans
gaattcactgcggccgccatgcgaaaccaaaatacacaggtgaagaagagg

SEQ ID NO: 36509 - DNA, 40 bp, Emericella nidulans
gttctcgagacgagcgatcgccggtgctcagcccgctggt

SEQ ID NO: 36510 - DNA, 51 bp, Emericella nidulans
gaattcactgcggccgccatgatggaagccatctaacacctcaatttgaca

SEQ ID NO: 36511 - DNA, 41 bp, Emericella nidulans
gttctcgagacgagcgatcgccaccgcctggcctgcttctt

SEQ ID NO: 36512 - DNA, 42 bp, Emericella nidulans
gaattcactgcggccgccatgcgcgtgtctttgcatggggtc

SEQ ID NO: 36513 - DNA, 50 bp, Emericella nidulans
gttctcgagacgagcgatcgccgctaacgtaggtgttgtagttgccttcg

SEQ ID NO: 36514 - DNA, 41 bp, Emericella nidulans
gaattcactgcggccgccatgtgggcaacctcgcatccaca

SEQ ID NO: 36515 - DNA, 44 bp, Emericella nidulans
gttctcgagacgagcgatcgctcccagcgcctgagagtattgga

SEQ ID NO: 36516 - DNA, 45 bp, Emericella nidulans
gaattcactgcggccgccatggcagttcagcgggaaagaacatcg

SEQ ID NO: 36517 - DNA, 44 bp, Emericella nidulans
gttctcgagacgagcgatcgcgacaattttcgctgccgctttgt

SEQ ID NO: 36518 - DNA, 43 bp, Emericella nidulans
gaattcactgcggccgccatgtccactggttcccgtttattgg

SEQ ID NO: 36519 - DNA, 47 bp, Emericella nidulans
gttctcgagacgagcgatcgccagtgtcaaacttaaacagccgcaca

SEQ ID NO: 36520 - DNA, 52 bp, Emericella nidulans
gaattcactgcggccgccatggtctacatggcctattacaccattgcccata

SEQ ID NO: 36521 - DNA, 48 bp, Emericella nidulans
gttctcgagacgagcgatcgccaacaatctcaatctccttggctcctg

SEQ ID NO: 36522 - DNA, 41 bp, Emericella nidulans
gaattcactgcggccgccatggacgacgcccggatgtcaga

SEQ ID NO: 36523 - DNA, 41 bp, Emericella nidulans
gttctcgagacgagcgatcgcgctgggccctttcgccgtag

SEQ ID NO: 36524 - DNA, 42 bp, Emericella nidulans
gaattcactgcggccgccatgtgacgccagggttagcgtcgt

SEQ ID NO: 36525 - DNA, 50 bp, Emericella nidulans
gttctcgagacgagcgatcgcaaagctgatatcctccttccggtagtggt

SEQ ID NO: 36526 - DNA, 43 bp, Emericella nidulans
gaattcactgcggccgccatgtgtacggcgagatccccaagga

SEQ ID NO: 36527 - DNA, 42 bp, Emericella nidulans
gttctcgagacgagcgatcgcgcagacatgccgtctccctca

SEQ ID NO: 36528 - DNA, 41 bp, Emericella nidulans
gaattcactgcggccgccatggggactgctgctccccctca

SEQ ID NO: 36529 - DNA, 45 bp, Emericella nidulans
gttctcgagacgagcgatcgcgacacagatctgtccgctgtcatc

SEQ ID NO: 36530 - DNA, 41 bp, Emericella nidulans
gaattcactgcggccgccatggtctgcacgcaatccggcac

SEQ ID NO: 36531 - DNA, 41 bp, Emericella nidulans
gttctcgagacgagcgatcgcgctcgcaccaggacctcgaa

SEQ ID NO: 36532 - DNA, 41 bp, Emericella nidulans
gaattcactgcggccgccatgccgcttgcggcatcacacat

SEQ ID NO: 36533 - DNA, 44 bp, Emericella nidulans
gttctcgagacgagcgatcgccacgcagttcagcgtgagaacca

SEQ ID NO: 36534 - DNA, 41 bp, Emericella nidulans
gaattcactgcggccgccatgctgctccccgccgacttcaa

SEQ ID NO: 36535 - DNA, 44 bp, Emericella nidulans
gttctcgagacgagcgatcgctggcttacgcattccatcccaga

SEQ ID NO: 36536 - DNA, 41 bp, Emericella nidulans
gaattcactgcggccgccatgctgggtgggctacgctgggt

SEQ ID NO: 36537 - DNA, 46 bp, Emericella nidulans
gttctcgagacgagcgatcgccagactcccgccttgaatgttcagt

SEQ ID NO: 36538 - DNA, 50 bp, Emericella nidulans
gaattcactgcggccgccatgcaagaccaaataataacacgcaccagacc

SEQ ID NO: 36539 - DNA, 45 bp, Emericella nidulans
gttctcgagacgagcgatcgctgcggtttagctaaggcgcttcaa

SEQ ID NO: 36540 - DNA, 43 bp, Emericella nidulans
gaattcactgcggccgccatgcggagctgggtccacacccaaa

SEQ ID NO: 36541 - DNA, 41 bp, Emericella nidulans
gttctcgagacgagcgatcgcccaaaaccaccgccgcaatc

SEQ ID NO: 36542 - DNA, 42 bp, Emericella nidulans
gaattcactgcggccgccatgtcgttgcgacgcaatcgtctg

SEQ ID NO: 36543 - DNA, 41 bp, Emericella nidulans
gttctcgagacgagcgatcgcgcgcctgctctgttggggtc

SEQ ID NO: 36544 - DNA, 42 bp, Emericella nidulans
gaattcactgcggccgccatgggggccattgcattgccatta

SEQ ID NO: 36545 - DNA, 49 bp, Emericella nidulans
gttctcgagacgagcgatcgcgaattggcgataagtccttttatgatga

SEQ ID NO: 36546 - DNA, 41 bp, Emericella nidulans
gaattcactgcggccgccatgacagcgggacgccaggaacc

SEQ ID NO: 36547 - DNA, 41 bp, Emericella nidulans
gttctcgagacgagcgatcgctcagccgctccctgtgttgc

SEQ ID NO: 36548 - DNA, 41 bp, Emericella nidulans
gaattcactgcggccgccatgggaacgggtgtcgcgggtaa

SEQ ID NO: 36549 - DNA, 41 bp, Emericella nidulans
gttctcgagacgagcgatcgctgggtaccggatcgccagga

SEQ ID NO: 36550 - DNA, 47 bp, Emericella nidulans
gaattcactgcggccgccatgtcttctcgggcaacgacatattcttc

SEQ ID NO: 36551 - DNA, 42 bp, Emericella nidulans
gttctcgagacgagcgatcgctggcattcttccctggcttca

SEQ ID NO: 36552 - DNA, 41 bp, Emericella nidulans
gaattcactgcggccgccatgtcgcctgtccgtccaacagc

SEQ ID NO: 36553 - DNA, 56 bp, Emericella nidulans
gttctcgagacgagcgatcgcattgtacattatgtgcgagccgactagtccaggaa

SEQ ID NO: 36554 - DNA, 41 bp, Emericella nidulans
gaattcactgcggccgccatgcacccctccggggtcgatct

SEQ ID NO: 36555 - DNA, 41 bp, Emericella nidulans
gttctcgagacgagcgatcgccccacttctgcagcccaaca

SEQ ID NO: 36556 - DNA, 46 bp, Emericella nidulans
gaattcactgcggccgccatgttcccactccatgacgaggagaaga

SEQ ID NO: 36557 - DNA, 41 bp, Emericella nidulans
gttctcgagacgagcgatcgcttgctgacgctcgccgtttg

SEQ ID NO: 36558 - DNA, 46 bp, Emericella nidulans; identical to SEQ ID NO: 36556

SEQ ID NO: 36559 - DNA, 41 bp, Emericella nidulans; identical to SEQ ID NO: 36557

SEQ ID NO: 36560 - DNA, 49 bp, Emericella nidulans
gaattcactgcggccgccatgtgatatgggtatgttcccttctgctaaa

SEQ ID NO: 36561 - DNA, 42 bp, Emericella nidulans
gttctcgagacgagcgatcgccgtccggcataccagctgtgg

SEQ ID NO: 36562 - DNA, 44 bp, Emericella nidulans
gaattcactgcggccgccatgcccttgcctgttcgtcaactccc

SEQ ID NO: 36563 - DNA, 52 bp, Emericella nidulans
gttctcgagacgagcgatcgcgcgataacttttcaagtgctttcgccagcta

SEQ ID NO: 36564 - DNA, 41 bp, Emericella nidulans
gaattcactgcggccgccatgggggaaagctgcgcctgcat

SEQ ID NO: 36565 - DNA, 41 bp, Emericella nidulans
gttctcgagacgagcgatcgccgacgtcggggaaggcctaa

SEQ ID NO: 36566 - DNA, 42 bp, Emericella nidulans
gaattcactgcggccgccatggaggacctccaccggcaagga

SEQ ID NO: 36567 - DNA, 41 bp, Emericella nidulans
gttctcgagacgagcgatcgcgcgatcggctttggcgaact

SEQ ID NO: 36568 - DNA, 41 bp, Emericella nidulans
gaattcactgcggccgccatggcctcggaacgactcaccgt

SEQ ID NO: 36569 - DNA, 41 bp, Emericella nidulans
gttctcgagacgagcgatcgcttccggttgcccttgccaaa

SEQ ID NO: 36570 - DNA, 43 bp, Emericella nidulans
gaattcactgcggccgccatgtccagcccacagaaacggcaat

SEQ ID NO: 36571 - DNA, 42 bp, Emericella nidulans
gttctcgagacgagcgatcgccctccccttctggtcccccac

SEQ ID NO: 36572 - DNA, 41 bp, Emericella nidulans
gaattcactgcggccgccatgtaccgcaggcgcgcagtatc

SEQ ID NO: 36573 - DNA, 56 bp, Emericella nidulans
gttctcgagacgagcgatcgcaagtatcattagtgaccatttctcttcaatgttgc

SEQ ID NO: 36574 - DNA, 42 bp, Emericella nidulans
gaattcactgcggccgccatgcgcatccgacgagcatgtttc

SEQ ID NO: 36575 - DNA, 42 bp, Emericella nidulans
gttctcgagacgagcgatcgcccatcctgcgcctgattgacc

SEQ ID NO: 36576 - DNA, 46 bp, Emericella nidulans
gaattcactgcggccgccatgccgcatgattttaacccacgtttca

SEQ ID NO: 36577 - DNA, 41 bp, Emericella nidulans
gttctcgagacgagcgatcgctccgagagggaggcgatcca

SEQ ID NO: 36578 - DNA, 42 bp, Emericella nidulans
gaattcactgcggccgccatggcgccactgcctatcgacctg

SEQ ID NO: 36579 - DNA, 47 bp, Emericella nidulans
gttctcgagacgagcgatcgccacattcaacaagcacctttccatga

SEQ ID NO: 36580 - DNA, 41 bp, Emericella nidulans
gaattcactgcggccgccatgcgagtgctggaggcggaagc

SEQ ID NO: 36581 - DNA, 48 bp, Emericella nidulans
gttctcgagacgagcgatcgcgcaagaccctagcgagaagtaaaggct

SEQ ID NO: 36582 - DNA, 57 bp, Emericella nidulans
gaattcactgcggccgccatgctctctttctctgtgcggtatatctaaatatccatt

SEQ ID NO: 36583 - DNA, 41 bp, Emericella nidulans
gttctcgagacgagcgatcgcgccctcgacgcgctcaacaa

SEQ ID NO: 36584 - DNA, 45 bp, Emericella nidulans
gaattcactgcggccgccatggaattcgggcgttgtacttcttgc

SEQ ID NO: 36585 - DNA, 41 bp, Emericella nidulans
gttctcgagacgagcgatcgccgaactgcgcgtcgtgttca

SEQ ID NO: 36586 - DNA, 40 bp, Emericella nidulans
gaattcactgcggccgccatgatcccggtggcccctttcc

SEQ ID NO: 36587 - DNA, 41 bp, Emericella nidulans
gttctcgagacgagcgatcgccaccgcggagggacaattcg

SEQ ID NO: 36588 - DNA, 45 bp, Emericella nidulans
gaattcactgcggccgccatgtgtctcgctagatacgccgccaat

SEQ ID NO: 36589 - DNA, 52 bp, Emericella nidulans
gttctcgagacgagcgatcgccttcttcagagtcttctgcttctctgcatca

SEQ ID NO: 36590 - DNA, 41 bp, Emericella nidulans
gaattcactgcggccgccatggccgtagcgggagagctgga

SEQ ID NO: 36591 - DNA, 41 bp, Emericella nidulans
gttctcgagacgagcgatcgcggggcctcgccgaaaaggat

SEQ ID NO: 36592 - DNA, 41 bp, Emericella nidulans
gaattcactgcggccgccatgcccgctctcatctttgtgcc

SEQ ID NO: 36593 - DNA, 41 bp, Emericella nidulans
gttctcgagacgagcgatcgcaggcgcgtgcactgtcgtgt

SEQ ID NO: 36594 - DNA, 50 bp, Emericella nidulans
gaattcactgcggccgccatggcagaaatgatcaaacgagaaaagctgga

SEQ ID NO: 36595 - DNA, 57 bp, Emericella nidulans
gttctcgagacgagcgatcgctaagatgataagtgcatcatctatactggccctgct

SEQ ID NO: 36596 - DNA, 45 bp, Emericella nidulans
gaattcactgcggccgccatgtcacagggacaagagccacagagc

SEQ ID NO: 36597 - DNA, 53 bp, Emericella nidulans
gttctcgagacgagcgatcgcagacgattgttaaggtgattagtaaagcaaga

SEQ ID NO: 36598 - DNA, 47 bp, Emericella nidulans
gaattcactgcggccgccatgtgccctaaccccgtgataagtgctat

SEQ ID NO: 36599 - DNA, 41 bp, Emericella nidulans
gttctcgagacgagcgatcgcttccaccatgcctcgggctc

SEQ ID NO: 36600 - DNA, 43 bp, Emericella nidulans
gaattcactgcggccgccatgtcacaatggcctcttgggagga

SEQ ID NO: 36601 - DNA, 45 bp, Emericella nidulans
gttctcgagacgagcgatcgctcgcaggatttccatcaaagttcg

SEQ ID NO: 36602 - DNA, 42 bp, Emericella nidulans
gaattcactgcggccgccatgtcagccccaaggtccaggtca

SEQ ID NO: 36603 - DNA, 41 bp, Emericella nidulans
gttctcgagacgagcgatcgcgccatgattgcgcaggcaaa

SEQ ID NO: 36604 - DNA, 41 bp, Emericella nidulans
gaattcactgcggccgccatggtgagcgcgagtccgcccta

SEQ ID NO: 36605 - DNA, 42 bp, Emericella nidulans
gttctcgagacgagcgatcgcggagccagctgctcgctcaga

SEQ ID NO: 36606 - DNA, 42 bp, Emericella nidulans
gaattcactgcggccgccatgtcacctgcgttctcggcttgg

SEQ ID NO: 36607 - DNA, 56 bp, Emericella nidulans
gttctcgagacgagcgatcgcgaacatatgaattacatttacctgcttatcgctca

SEQ ID NO: 36608 - DNA, 41 bp, Emericella nidulans
gaattcactgcggccgccatgcgtcaccggtgtcgggaagg

SEQ ID NO: 36609 - DNA, 49 bp, Emericella nidulans
gttctcgagacgagcgatcgctccagttcctgtacccttctttgaaacg

SEQ ID NO: 36610 - DNA, 44 bp, Emericella nidulans
gaattcactgcggccgccatgggcgccctttggtattttcttcc

SEQ ID NO: 36611 - DNA, 41 bp, Emericella nidulans
gttctcgagacgagcgatcgcccacgaccatcggccgttct

SEQ ID NO: 36612 - DNA, 44 bp, Emericella nidulans
gaattcactgcggccgccatgttcagtctcgcaaagtgcccacc

SEQ ID NO: 36613 - DNA, 42 bp, Emericella nidulans
gttctcgagacgagcgatcgccgccatggggagacgatgatg

SEQ ID NO: 36614 - DNA, 40 bp, Emericella nidulans
gaattcactgcggccgccatggtgccgtcccgcccttgtt

SEQ ID NO: 36615 - DNA, 45 bp, Emericella nidulans
gttctcgagacgagcgatcgccgtgcagtcggtaaagctcgattc

SEQ ID NO: 36616 - DNA, 41 bp, Emericella nidulans
gaattcactgcggccgccatgtcacaagggagcccagcaga

SEQ ID NO: 36617 - DNA, 41 bp, Emericella nidulans
gttctcgagacgagcgatcgcagcagccgcgactgggattg

SEQ ID NO: 36618 - DNA, 43 bp, Emericella nidulans
gaattcactgcggccgccatggcctttcaccaggtcgtcatgc

SEQ ID NO: 36619 - DNA, 44 bp, Emericella nidulans
gttctcgagacgagcgatcgcctccgtctcctcgctctcaggct

SEQ ID NO: 36620 - DNA, 45 bp, Emericella nidulans
gaattcactgcggccgccatgggtcgtacgtcacgctcaaatcca

SEQ ID NO: 36621 - DNA, 52 bp, Emericella nidulans
gttctcgagacgagcgatcgccaacctcattattgtacgtctttcccactcc

SEQ ID NO: 36622 - DNA, 46 bp, Emericella nidulans
gaattcactgcggccgccatgcgtcattcacctccatgtcctgcat

SEQ ID NO: 36623 - DNA, 45 bp, Emericella nidulans
gttctcgagacgagcgatcgccggagtccaaagtccacaccactg

SEQ ID NO: 36624 - DNA, 43 bp, Emericella nidulans
gaattcactgcggccgccatgtgttcggagcgcatgtctgttg

SEQ ID NO: 36625 - DNA, 47 bp, Emericella nidulans
gttctcgagacgagcgatcgccaccggttgaatgaggatatttccaa

SEQ ID NO: 36626 - DNA, 53 bp, Emericella nidulans
gaattcactgcggccgccatgtcggttacaatcattctttttcatcctcttcg

SEQ ID NO: 36627 - DNA, 41 bp, Emericella nidulans
gttctcgagacgagcgatcgccctccttccttcggcggaca

SEQ ID NO: 36628 - DNA, 55 bp, Emericella nidulans
gaattcactgcggccgccatgccattttactataccttccaggctaacaagtccc

SEQ ID NO: 36629 - DNA, 47 bp, Emericella nidulans
gttctcgagacgagcgatcgcgttgaggaagttgaagatgctcagga

SEQ ID NO: 36630 - DNA, 47 bp, Emericella nidulans
gaattcactgcggccgccatgcaaaaggaatcatcatcagcgccaaa

SEQ ID NO: 36631 - DNA, 43 bp, Emericella nidulans
gttctcgagacgagcgatcgccgtcttctcgcaagcagcatcc

SEQ ID NO: 36632 - DNA, 41 bp, Emericella nidulans
gaattcactgcggccgccatgtgcgggtttgcgagctgctt

SEQ ID NO: 36633 - DNA, 43 bp, Emericella nidulans
gttctcgagacgagcgatcgcgggaaggaccatgcctggtttg

SEQ ID NO: 36634 - DNA, 42 bp, Emericella nidulans
gaattcactgcggccgccatgcgacctccactgctgccaggt

SEQ ID NO: 36635 - DNA, 41 bp, Emericella nidulans
gttctcgagacgagcgatcgcacccgctccttccctttgga

SEQ ID NO: 36636 - DNA, 51 bp, Emericella nidulans
gaattcactgcggccgccatgaaattgattgtacagaggtccaggcttgtg

SEQ ID NO: 36637 - DNA, 43 bp, Emericella nidulans; identical to SEQ ID NO: 36631

SEQ ID NO: 36638 - DNA, 42 bp, Emericella nidulans
gaattcactgcggccgccatgtcggctaccccagacggttcc

SEQ ID NO: 36639 - DNA, 41 bp, Emericella nidulans
gttctcgagacgagcgatcgcgagcagcgcgctcaggatca

SEQ ID NO: 36640 - DNA, 52 bp, Emericella nidulans
gaattcactgcggccgccatgaatgttgtccagtcagtttcatctaatatcg

SEQ ID NO: 36641 - DNA, 53 bp, Emericella nidulans
gttctcgagacgagcgatcgcctatcagaaaactagcgtttcttctaggggta

SEQ ID NO: 36642 - DNA, 41 bp, Emericella nidulans
gaattcactgcggccgccatgtcgtctcacgggcggcagta

SEQ ID NO: 36643 - DNA, 41 bp, Emericella nidulans
gttctcgagacgagcgatcgcggctggacttgcgccgactg

SEQ ID NO: 36644 - DNA, 42 bp, Emericella nidulans
gaattcactgcggccgccatgtcgtgaggaggagggcgaaca

SEQ ID NO: 36645 - DNA, 41 bp, Emericella nidulans
gttctcgagacgagcgatcgcgttgcagatgcggccgtaga

SEQ ID NO: 36646 - DNA, 45 bp, Emericella nidulans
gaattcactgcggccgccatgaaaaccaaatgcagtggtgacaca

SEQ ID NO: 36647 - DNA, 44 bp, Emericella nidulans
gttctcgagacgagcgatcgccgacaccgatatagcgtggctga

SEQ ID NO: 36648 - DNA, 44 bp, Emericella nidulans
gaattcactgcggccgccatgcgcccttaccgcgaggttagcat

SEQ ID NO: 36649 - DNA, 44 bp, Emericella nidulans
gttctcgagacgagcgatcgcgcaggagtcgtccaaagcaggtc

SEQ ID NO: 36650 - DNA, 54 bp, Emericella nidulans
gaattcactgcggccgccatgaagtaagtagacagcgtatgcgaattccagggt

SEQ ID NO: 36651 - DNA, 41 bp, Emericella nidulans
gttctcgagacgagcgatcgcgggtctcccgaggcgtccac

SEQ ID NO: 36652 - DNA, 54 bp, Emericella nidulans; identical to SEQ ID NO: 36650

SEQ ID NO: 36653 - DNA, 41 bp, Emericella nidulans; identical to SEQ ID NO: 36651

SEQ ID NO: 36654 - DNA, 41 bp, Emericella nidulans
gaattcactgcggccgccatggtgggggcggggttgatctg

SEQ ID NO: 36655 - DNA, 55 bp, Emericella nidulans
gttctcgagacgagcgatcgcttatatgccctcaggttttacagtagtttgctcc

SEQ ID NO: 36656 - DNA, 40 bp, Emericella nidulans
gaattcactgcggccgccatggggggcccctcaggactgg

SEQ ID NO: 36657 - DNA, 41 bp, Emericella nidulans
gttctcgagacgagcgatcgccgcttacccccgcagaacca

SEQ ID NO: 36658 - DNA, 48 bp, Emericella nidulans
gaattcactgcggccgccatgtcatcgctccctttgcatatcttctca

SEQ ID NO: 36659 - DNA, 41 bp, Emericella nidulans
gttctcgagacgagcgatcgcatccgtccttgcctcgtgcc

SEQ ID NO: 36660 - DNA, 41 bp, Emericella nidulans
gaattcactgcggccgccatgcggttcgctcctcgagccac

SEQ ID NO: 36661 - DNA, 45 bp, Emericella nidulans
gttctcgagacgagcgatcgcccaaagcctgggagtgaagtttga

SEQ ID NO: 36662 - DNA, 41 bp, Emericella nidulans
gaattcactgcggccgccatgggtggcgagctgagcaatct

SEQ ID NO: 36663 - DNA, 41 bp, Emericella nidulans
gttctcgagacgagcgatcgcaagggggcattgctgccaga

SEQ ID NO: 36664 - DNA, 51 bp, Emericella nidulans
gaattcactgcggccgccatgatatcttcagtcctttctcacaggaacagg

SEQ ID NO: 36665 - DNA, 41 bp, Emericella nidulans
gttctcgagacgagcgatcgctctgaccgagcgcagcatcc

SEQ ID NO: 36666 - DNA, 49 bp, Emericella nidulans
gaattcactgcggccgccatgtcggagtattcaagaacattgagcacat

SEQ ID NO: 36667 - DNA, 50 bp, Emericella nidulans
gttctcgagacgagcgatcgcatgtaaatcatggcccgattgttcctatc

SEQ ID NO: 36668 - DNA, 43 bp, Emericella nidulans
gaattcactgcggccgccatgggcaatgtccgaaaagggcaga

SEQ ID NO: 36669 - DNA, 41 bp, Emericella nidulans
gttctcgagacgagcgatcgccccggagccgatcctccata

SEQ ID NO: 36670 - DNA, 42 bp, Emericella nidulans
gaattcactgcggccgccatgtggcctgaccactcgcgatct

SEQ ID NO: 36671 - DNA, 42 bp, Emericella nidulans
gttctcgagacgagcgatcgctcaccactgtgctgtcgtggg

SEQ ID NO: 36672 - DNA, 44 bp, Emericella nidulans
gaattcactgcggccgccatgtggctgaacacgaggaactcagc

SEQ ID NO: 36673 - DNA, 46 bp, Emericella nidulans
gttctcgagacgagcgatcgctccacttccaggcttcgatcgtaca

SEQ ID NO: 36674 - DNA, 42 bp, Emericella nidulans
gaattcactgcggccgccatgcggagaccgggactctgaaaa

SEQ ID NO: 36675 - DNA, 42 bp, Emericella nidulans
gttctcgagacgagcgatcgcgcggtgctcgtggatttctgc

SEQ ID NO: 36676 - DNA, 41 bp, Emericella nidulans
gaattcactgcggccgccatgccctccgacaggggattcca

SEQ ID NO: 36677 - DNA, 43 bp, Emericella nidulans
gttctcgagacgagcgatcgctcaaccctgaagggcagtcagc

SEQ ID NO: 36678 - DNA, 41 bp, Emericella nidulans
gaattcactgcggccgccatgtcccccaaccaggtcggtca

SEQ ID NO: 36679 - DNA, 41 bp, Emericella nidulans
gttctcgagacgagcgatcgcagcggtgagcaggccatgaa

SEQ ID NO: 36680 - DNA, 41 bp, Emericella nidulans
gaattcactgcggccgccatgtgccacccaaccctccccta

SEQ ID NO: 36681 - DNA, 44 bp, Emericella nidulans
gttctcgagacgagcgatcgccctgcaggtcatggccgtaggta

SEQ ID NO: 36682 - DNA, 52 bp, Emericella nidulans
gaattcactgcggccgccatgtgttgatctctcaaaagtatgctcaagggtg

SEQ ID NO: 36683 - DNA, 47 bp, Emericella nidulans
gttctcgagacgagcgatcgccaatctggtgattgggacagttctcg

SEQ ID NO: 36684 - DNA, 43 bp, Emericella nidulans
gaattcactgcggccgccatggctctcacgatcacctcgttgc

SEQ ID NO: 36685 - DNA, 43 bp, Emericella nidulans
gttctcgagacgagcgatcgcgcgcgtcttgaagagcccctta

SEQ ID NO: 36686 - DNA, 41 bp, Emericella nidulans
gaattcactgcggccgccatgcgacgccgtcaaacgccata

SEQ ID NO: 36687 - DNA, 41 bp, Emericella nidulans
gttctcgagacgagcgatcgcgcagagccagctccgcttcc

SEQ ID NO: 36688 - DNA, 41 bp, Emericella nidulans
gaattcactgcggccgccatgcgcaggcgcgcaccttttac

SEQ ID NO: 36689 - DNA, 42 bp, Emericella nidulans
gttctcgagacgagcgatcgccgtccatcttgtccccgggtt

SEQ ID NO: 36690 - DNA, 43 bp, Emericella nidulans
gaattcactgcggccgccatgcggagcttccctatagcctccc

SEQ ID NO: 36691 - DNA, 42 bp, Emericella nidulans
gttctcgagacgagcgatcgccgcgcgagagactctcaacca

SEQ ID NO: 36692 - DNA, 41 bp, Emericella nidulans
gaattcactgcggccgccatgcgatggatggcttcggcaca

SEQ ID NO: 36693 - DNA, 41 bp, Emericella nidulans
gttctcgagacgagcgatcgcatcaccgcaggggcaacacc

SEQ ID NO: 36694 - DNA, 45 bp, Emericella nidulans
gaattcactgcggccgccatgtgcaagatgggcctagaaggatcg

SEQ ID NO: 36695 - DNA, 44 bp, Emericella nidulans
gttctcgagacgagcgatcgctggccgtgtttatgacctgcacc

SEQ ID NO: 36696 - DNA, 44 bp, Emericella nidulans
gaattcactgcggccgccatgtgttgaaaaatccctggcgcaaa

SEQ ID NO: 36697 - DNA, 51 bp, Emericella nidulans
gttctcgagacgagcgatcgcagaacacacctcagcaatagattgcctctc

SEQ ID NO: 36698 - DNA, 41 bp, Emericella nidulans
gaattcactgcggccgccatgcaagccgacgagccccagat

SEQ ID NO: 36699 - DNA, 42 bp, Emericella nidulans
gttctcgagacgagcgatcgccccccagaccgccatgtatga

SEQ ID NO: 36700 - DNA, 43 bp, Emericella nidulans
gaattcactgcggccgccatgtcaagcaaaagcggctgtgtcg

SEQ ID NO: 36701 - DNA, 57 bp, Emericella nidulans
gttctcgagacgagcgatcgcattctattccttgatatcaacgtatgcaaccttctg

SEQ ID NO: 36702 - DNA, 57 bp, Emericella nidulans
gaattcactgcggccgccatgttattcttaatgttagtctagtctctcctgttctcg

SEQ ID NO: 36703 - DNA, 42 bp, Emericella nidulans; identical to SEQ ID NO: 36675

SEQ ID NO: 36704 - DNA, 41 bp, Emericella nidulans; identical to SEQ ID NO: 36536

SEQ ID NO: 36705 - DNA, 41 bp, Emericella nidulans
gttctcgagacgagcgatcgcgtctcttgaggcgccgggtg

SEQ ID NO: 36706 - DNA, 46 bp, Emericella nidulans
gaattcactgcggccgccatgtcatccatcaacaaactgccatcca

SEQ ID NO: 36707 - DNA, 51 bp, Emericella nidulans
gttctcgagacgagcgatcgcattgctcctgatagaccttccggataaacc

SEQ ID NO: 36708 - DNA, 41 bp, Emericella nidulans
gaattcactgcggccgccatgcgggcgaaatcgccgactct

SEQ ID NO: 36709 - DNA, 54 bp, Emericella nidulans
gttctcgagacgagcgatcgcacattgccgtcatatcatgtattctttttaccc

SEQ ID NO: 36710 - DNA, 42 bp, Emericella nidulans
gaattcactgcggccgccatgcaaggctctccacggcgaaca

SEQ ID NO: 36711 - DNA, 43 bp, Emericella nidulans
gttctcgagacgagcgatcgctgcaaaatccctacccgccaac

SEQ ID NO: 36712 - DNA, 41 bp, Emericella nidulans
gaattcactgcggccgccatgcgctccagatggcgtttcca

SEQ ID NO: 36713 - DNA, 53 bp, Emericella nidulans
gttctcgagacgagcgatcgcaaaagtatgttacttgcacttttgacctcagt

SEQ ID NO: 36714 - DNA, 43 bp, Emericella nidulans; identical to SEQ ID NO: 28488

SEQ ID NO: 36715 - DNA, 48 bp, Emericella nidulans
gttctcgagacgagcgatcgctgttctgatggatcagtgtatggatgg

SEQ ID NO: 36716 - DNA, 42 bp, Emericella nidulans
gaattcactgcggccgccatgcgtgagccgggaggctaaagt

SEQ ID NO: 36717 - DNA, 41 bp, Emericella nidulans
gttctcgagacgagcgatcgccagttgcccgttgcgcttga

SEQ ID NO: 36718 - DNA, 41 bp, Emericella nidulans
gaattcactgcggccgccatgaagctgcgccgcattggtgt

SEQ ID NO: 36719 - DNA, 41 bp, Emericella nidulans
gttctcgagacgagcgatcgcaccggtccacattgctttgg

SEQ ID NO: 36720 - DNA, 47 bp, Emericella nidulans
gaattcactgcggccgccatgcgtctaaaggcgatcaaagccgttgt

SEQ ID NO: 36721 - DNA, 53 bp, Emericella nidulans
gttctcgagacgagcgatcgcaagatgttcttggtagcttggagactttaggc

SEQ ID NO: 36722 - DNA, 48 bp, Emericella nidulans
gaattcactgcggccgccatgatctcaaagcacgtggttttcaactgg

SEQ ID NO: 36723 - DNA, 54 bp, Emericella nidulans
gttctcgagacgagcgatcgctttttatctcatcttggctgaagtataggtgtg

SEQ ID NO: 36724 - DNA, 41 bp, Emericella nidulans
gaattcactgcggccgccatgtgctcaccgccgggtaaggt

SEQ ID NO: 36725 - DNA, 42 bp, Emericella nidulans
gttctcgagacgagcgatcgccatcgccgagacttcgggtca

SEQ ID NO: 36726 - DNA, 53 bp, Emericella nidulans
gaattcactgcggccgccatggttcatagtcgatatctcagccttgcaactca

SEQ ID NO: 36727 - DNA, 48 bp, Emericella nidulans
gttctcgagacgagcgatcgcatacctctgctgtctccaccgcatacc

SEQ ID NO: 36728 - DNA, 41 bp, Emericella nidulans
gaattcactgcggccgccatggcacgcaccaacaagggaca

SEQ ID NO: 36729 - DNA, 42 bp, Emericella nidulans
gttctcgagacgagcgatcgctcccacgcctcttgcaactcg

SEQ ID NO: 36730 - DNA, 43 bp, Emericella nidulans
gaattcactgcggccgccatgcggaagatgacaagggcgtgga

SEQ ID NO: 36731 - DNA, 41 bp, Emericella nidulans
gttctcgagacgagcgatcgcctgcgctgctcgtcgctctg

SEQ ID NO: 36732 - DNA, 43 bp, Emericella nidulans
gaattcactgcggccgccatgccgagcgcgatctagatgagga

SEQ ID NO: 36733 - DNA, 41 bp, Emericella nidulans
gttctcgagacgagcgatcgcacggatttcaagccggtggc

SEQ ID NO: 36734 - DNA, 43 bp, Emericella nidulans
gaattcactgcggccgccatgcggaagacctcgccttcctcct

SEQ ID NO: 36735 - DNA, 41 bp, Emericella nidulans
gttctcgagacgagcgatcgcgcggcaattgacccgcattt

SEQ ID NO: 36736 - DNA, 41 bp, Emericella nidulans
gaattcactgcggccgccatgcgcaattcccggcaagcatt

SEQ ID NO: 36737 - DNA, 45 bp, Emericella nidulans
gttctcgagacgagcgatcgccgatatcgaggtgcagggttttgc

SEQ ID NO: 36738 - DNA, 41 bp, Emericella nidulans
gaattcactgcggccgccatgacggctccctacggctgctg

SEQ ID NO: 36739 - DNA, 51 bp, Emericella nidulans
gttctcgagacgagcgatcgccgctgtactaatattccacaaggaggcaca

SEQ ID NO: 36740 - DNA, 41 bp, Emericella nidulans
gaattcactgcggccgccatgtcggaacgcgcccttacctg

SEQ ID NO: 36741 - DNA, 42 bp, Emericella nidulans
gttctcgagacgagcgatcgcgcctggcccctgaacataccc

SEQ ID NO: 36742 - DNA, 44 bp, Emericella nidulans
gaattcactgcggccgccatgcccaatacccaggaattcgcctc

SEQ ID NO: 36743 - DNA, 41 bp, Emericella nidulans
gttctcgagacgagcgatcgccgccgcgaagatcacatccc

SEQ ID NO: 36744 - DNA, 55 bp, Emericella nidulans
gaattcactgcggccgccatgcaataacctcagcgtacagagagtatgttatgga

SEQ ID NO: 36745 - DNA, 44 bp, Emericella nidulans
gttctcgagacgagcgatcgctgcggtattccctcattcgctgt

SEQ ID NO: 36746 - DNA, 41 bp, Emericella nidulans
gaattcactgcggccgccatgcaggcgagcctcggcaattc

SEQ ID NO: 36747 - DNA, 42 bp, Emericella nidulans
gttctcgagacgagcgatcgcagatcgtcctctgccgcaacg

SEQ ID NO: 36748 - DNA, 41 bp, Emericella nidulans
gaattcactgcggccgccatgtgctggggtgctgaaggagg

SEQ ID NO: 36749 - DNA, 48 bp, Emericella nidulans
gttctcgagacgagcgatcgcgggggtaagttgcttgtttcttctctc

SEQ ID NO: 36750 - DNA, 41 bp, Emericella nidulans
gaattcactgcggccgccatggccaaggcctacgcatccac

SEQ ID NO: 36751 - DNA, 41 bp, Emericella nidulans
gttctcgagacgagcgatcgcgaggacgccggggtacatct

SEQ ID NO: 36752 - DNA, 42 bp, Emericella nidulans
gaattcactgcggccgccatgggccacgaacgacgtggaaga

SEQ ID NO: 36753 - DNA, 46 bp, Emericella nidulans
gttctcgagacgagcgatcgctccctgcgtctggttagaagccttg

SEQ ID NO: 36754 - DNA, 40 bp, Emericella nidulans
gaattcactgcggccgccatgcgccctgggggctttaggg

SEQ ID NO: 36755 - DNA, 43 bp, Emericella nidulans
gttctcgagacgagcgatcgcgttggccaggatggtacgaaca

SEQ ID NO: 36756 - DNA, 41 bp, Emericella nidulans
gaattcactgcggccgccatgggatcaatccagtgaagcaa

SEQ ID NO: 36757 - DNA, 41 bp, Emericella nidulans
gttctcgagacgagcgatcgctgccttttcaaggaagtgct

SEQ ID NO: 36758 - DNA, 48 bp, Emericella nidulans
gaattcactgcggccgccatgggtctttcaagagcgaaaggatgatct

SEQ ID NO: 36759 - DNA, 44 bp, Emericella nidulans
gttctcgagacgagcgatcgctcgcagagtttgtcgacctttcc

SEQ ID NO: 36760 - DNA, 41 bp, Emericella nidulans
gaattcactgcggccgccatgcaaaatttgcctgccagtgt

SEQ ID NO: 36761 - DNA, 47 bp, Emericella nidulans
gttctcgagacgagcgatcgcctcctcttccgagtaactttaacttc

SEQ ID NO: 36762 - DNA, 40 bp, Emericella nidulans
gaattcactgcggccgccatgagcaggcacaggaggagat

SEQ ID NO: 36763 - DNA, 42 bp, Emericella nidulans
gttctcgagacgagcgatcgcccgacaattccagatcttgtt

SEQ ID NO: 36764 - DNA, 41 bp, Emericella nidulans
gaattcactgcggccgccatgcatcatgttcctccctcagc

SEQ ID NO: 36765 - DNA, 41 bp, Emericella nidulans
gttctcgagacgagcgatcgccagaccttttggagctcgtc

SEQ ID NO: 36766 - DNA, 39 bp, Emericella nidulans
gaattcactgcggccgccatggcgaagcttggtgaggaa

SEQ ID NO: 36767 - DNA, 41 bp, Emericella nidulans
gttctcgagacgagcgatcgcagctagcatggctcaaggac

SEQ ID NO: 36768 - DNA, 41 bp, Emericella nidulans
gaattcactgcggccgccatgacggggaagaaagaactggt

SEQ ID NO: 36769 - DNA, 41 bp, Emericella nidulans
gttctcgagacgagcgatcgctcaagccacgttttcatctg

SEQ ID NO: 36770 - DNA, 42 bp, Emericella nidulans
gaattcactgcggccgccatggctctgaggagagggcgaggg

SEQ ID NO: 36771 - DNA, 41 bp, Emericella nidulans
gttctcgagacgagcgatcgcggcggatgcgtggcatacaa

SEQ ID NO: 36772 - DNA, 41 bp, Emericella nidulans
gaattcactgcggccgccatgcccgcgaaaaccgccatgat

SEQ ID NO: 36773 - DNA, 49 bp, Emericella nidulans
gttctcgagacgagcgatcgccactatgtccgtctatatacccccaaca

SEQ ID NO: 36774 - DNA, 44 bp, Emericella nidulans
gaattcactgcggccgccatgtcaatatgactgggacattagca

SEQ ID NO: 36775 - DNA, 41 bp, Emericella nidulans
gttctcgagacgagcgatcgcgctccaagttgcagagccta

SEQ ID NO: 36776 - DNA, 47 bp, Emericella nidulans
gaattcactgcggccgccatgtcctttctttcaccatcctcttgacc

SEQ ID NO: 36777 - DNA, 42 bp, Emericella nidulans
gttctcgagacgagcgatcgctcatgggcacatcaagctccc

SEQ ID NO: 36778 - DNA, 49 bp, Emericella nidulans
gaattcactgcggccgccatgttattcccatcattcactgggagaagac

SEQ ID NO: 36779 - DNA, 47 bp, Emericella nidulans
gttctcgagacgagcgatcgcacggtggaggcgtactagtcatgtca

SEQ ID NO: 36780 - DNA, 41 bp, Emericella nidulans
gaattcactgcggccgccatgagtcttcggccgcgcgaact

SEQ ID NO: 36781 - DNA, 46 bp, Emericella nidulans
gttctcgagacgagcgatcgccaccaaggcgtacaagaatccaaca

SEQ ID NO: 36782 - DNA, 41 bp, Emericella nidulans
gaattcactgcggccgccatgctgccgtcaaaccaacctat

SEQ ID NO: 36783 - DNA, 43 bp, Emericella nidulans
gttctcgagacgagcgatcgcgtaaactttggtgcccaaataa

SEQ ID NO: 36784 - DNA, 49 bp, Emericella nidulans
gaattcactgcggccgccatgcttaaagtaaaccgcatgatggaaattg

SEQ ID NO: 36785 - DNA, 49 bp, Emericella nidulans
gttctcgagacgagcgatcgcttaggattgatgacggagatttgatttg

SEQ ID NO: 36786 - DNA, 41 bp, Emericella nidulans
gaattcactgcggccgccatggcacctcacacgcggccatt

SEQ ID NO: 36787 - DNA, 41 bp, Emericella nidulans
gttctcgagacgagcgatcgccgcgttcgtgaaaccgatgg

SEQ ID NO: 36788 - DNA, 49 bp, Emericella nidulans
gaattcactgcggccgccatgagcgtctagcaaataccaaaaggtaagg

SEQ ID NO: 36789 - DNA, 40 bp, Emericella nidulans
gttctcgagacgagcgatcgccggacgggcaaacgggttc

SEQ ID NO: 36790 - DNA, 41 bp, Emericella nidulans
gaattcactgcggccgccatgtggattgagggcggcgtgat

SEQ ID NO: 36791 - DNA, 43 bp, Emericella nidulans
gttctcgagacgagcgatcgctcccgacagccatggtgattgt

SEQ ID NO: 36792 - DNA, 48 bp, Emericella nidulans
gaattcactgcggccgccatggagactagagtcatggctgtctgcact

SEQ ID NO: 36793 - DNA, 43 bp, Emericella nidulans
gttctcgagacgagcgatcgctggtggctggttctggttctgc

SEQ ID NO: 36794 - DNA, 41 bp, Emericella nidulans
gaattcactgcggccgccatgagcgtccgaaaccgtgtggc

SEQ ID NO: 36795 - DNA, 47 bp, Emericella nidulans
gttctcgagacgagcgatcgctcaaaactctcgctcgcgaagccgta

SEQ ID NO: 36796 - DNA, 49 bp, Emericella nidulans
gaattcactgcggccgccatgacaagtatgaggtcgatattgcgcgagt

SEQ ID NO: 36797 - DNA, 49 bp, Emericella nidulans
gttctcgagacgagcgatcgcctcagatctgttttcaagaacggtgtca

SEQ ID NO: 36798 - DNA, 43 bp, Emericella nidulans
gaattcactgcggccgccatgcaccgtcagagtccggagatgc

SEQ ID NO: 36799 - DNA, 48 bp, Emericella nidulans
gttctcgagacgagcgatcgcgcggtataccaagcatcgaaagtacgg

SEQ ID NO: 36800 - DNA, 41 bp, Emericella nidulans
gaattcactgcggccgccatgccgccgtctcatgcgtgact

SEQ ID NO: 36801 - DNA, 45 bp, Emericella nidulans
gttctcgagacgagcgatcgccgttgggatggaacatctggctga

SEQ ID NO: 36802 - DNA, 49 bp, Emericella nidulans
gaattcactgcggccgccatgcagtctcatgatacgtcaattccgccac

SEQ ID NO: 36803 - DNA, 41 bp, Emericella nidulans
gttctcgagacgagcgatcgccgcggcacagttcagctggt

SEQ ID NO: 36804 - DNA, 40 bp, Emericella nidulans
gaattcactgcggccgccatggtcagctccctccaaggct

SEQ ID NO: 36805 - DNA, 39 bp, Emericella nidulans
gttctcgagacgagcgatcgcgcattgcgccaactcacc

SEQ ID NO: 36806 - DNA, 49 bp, Emericella nidulans
gaattcactgcggccgccatgcatctatctgccatggaggccatcccac

SEQ ID NO: 36807 - DNA, 45 bp, Emericella nidulans
gttctcgagacgagcgatcgccccttttctccaggagcagtgacc

SEQ ID NO: 36808 - DNA, 41 bp, Emericella nidulans
gaattcactgcggccgccatgtccacaaagggccgacacga

SEQ ID NO: 36809 - DNA, 41 bp, Emericella nidulans
gttctcgagacgagcgatcgccccatgggcgcaccgagatt

SEQ ID NO: 36810 - DNA, 47 bp, Emericella nidulans
gaattcactgcggccgccatggactggaaactgtcaccaacaactgc

SEQ ID NO: 36811 - DNA, 41 bp, Emericella nidulans
gttctcgagacgagcgatcgcgccagtcggtcggggatgag

SEQ ID NO: 36812 - DNA, 48 bp, Emericella nidulans
gaattcactgcggccgccatgtagtatgggaatggcgctaaacaactt

SEQ ID NO: 36813 - DNA, 41 bp, Emericella nidulans
gttctcgagacgagcgatcgctcaccacgctaccgggggtc

SEQ ID NO: 36814 - DNA, 41 bp, Emericella nidulans
gaattcactgcggccgccatgtatggtaattccgcagggtt

SEQ ID NO: 36815 - DNA, 45 bp, Emericella nidulans
gttctcgagacgagcgatcgcggtagtagacagaggaacctccaa

SEQ ID NO: 36816 - DNA, 46 bp, Emericella nidulans
gaattcactgcggccgccatgctgaatttattgttgacctgtgaag

SEQ ID NO: 36817 - DNA, 40 bp, Emericella nidulans
gttctcgagacgagcgatcgcaggacgacgaggatggagt

SEQ ID NO: 36818 - DNA, 41 bp, Emericella nidulans
gaattcactgcggccgccatgctgggtgtgtaccaagaggg

SEQ ID NO: 36819 - DNA, 41 bp, Emericella nidulans
gttctcgagacgagcgatcgcccaacagcactcttgacgaa

SEQ ID NO: 36820 - DNA, 49 bp, Emericella nidulans
gaattcactgcggccgccatggctctctgacattgagattctgagccac

SEQ ID NO: 36821 - DNA, 47 bp, Emericella nidulans
gttctcgagacgagcgatcgcgaacttgtagacctggtccttgctgt

SEQ ID NO: 36822 - DNA, 41 bp, Emericella nidulans
gaattcactgcggccgccatgccacgccatcccgctcagat

SEQ ID NO: 36823 - DNA, 46 bp, Emericella nidulans
gttctcgagacgagcgatcgccaaagagtcccaagatccagtgcaa

SEQ ID NO: 36824 - DNA, 41 bp, Emericella nidulans
gaattcactgcggccgccatggcgggggcggttctgtgttt

SEQ ID NO: 36825 - DNA, 49 bp, Emericella nidulans
gttctcgagacgagcgatcgcggatggtacaaggtttcttcgagtatca

SEQ ID NO: 36826 - DNA, 49 bp, Emericella nidulans
gaattcactgcggccgccatgtcgattcgctattcacaacactaaaacc

SEQ ID NO: 36827 - DNA, 44 bp, Emericella nidulans
gttctcgagacgagcgatcgccaccaccatcgtcctcatcatgg

SEQ ID NO: 36828 - DNA, 41 bp, Emericella nidulans
gaattcactgcggccgccatgcgcgctgcgaataatggtca

SEQ ID NO: 36829 - DNA, 44 bp, Emericella nidulans
gttctcgagacgagcgatcgccgccgacatcttcgtgattgagc

SEQ ID NO: 36830 - DNA, 44 bp, Emericella nidulans
gaattcactgcggccgccatgggtcatttgatgcaggtgccgta

SEQ ID NO: 36831 - DNA, 48 bp, Emericella nidulans
gttctcgagacgagcgatcgcgacacttacggatccacgatgaaaacc

SEQ ID NO: 36832 - DNA, 47 bp, Emericella nidulans
gaattcactgcggccgccatggacaccccagagttacaagttgatgg

SEQ ID NO: 36833 - DNA, 49 bp, Emericella nidulans
gttctcgagacgagcgatcgcgagctatgagtacgaagtgacatcagca

SEQ ID NO: 36834 - DNA, 41 bp, Emericella nidulans
gaattcactgcggccgccatgcgcttgggtttgtcgacctg

SEQ ID NO: 36835 - DNA, 41 bp, Emericella nidulans
gttctcgagacgagcgatcgcttcccacgcgttgggtcagc

SEQ ID NO: 36836 - DNA, 49 bp, Emericella nidulans
gaattcactgcggccgccatgttgtttctcttgaggccgtccgccttct

SEQ ID NO: 36837 - DNA, 41 bp, Emericella nidulans
gttctcgagacgagcgatcgcggcattgaggcagcggagga

SEQ ID NO: 36838 - DNA, 43 bp, Emericella nidulans
gaattcactgcggccgccatgttcaggacggccagccagagat

SEQ ID NO: 36839 - DNA, 49 bp, Emericella nidulans
gttctcgagacgagcgatcgccgtagtcataaacggtactcggacattg

SEQ ID NO: 36840 - DNA, 42 bp, Emericella nidulans
gaattcactgcggccgccatgccacctacgtccttgtcactg

SEQ ID NO: 36841 - DNA, 41 bp, Emericella nidulans
gttctcgagacgagcgatcgcaccccagttcaaaaggttcc

SEQ ID NO: 36842 - DNA, 48 bp, Emericella nidulans
gaattcactgcggccgccatgccgttcgagtacctccgtcttacttcg

SEQ ID NO: 36843 - DNA, 41 bp, Emericella nidulans
gttctcgagacgagcgatcgctgcgccgtcggacacgttat

SEQ ID NO: 36844 - DNA, 42 bp, Emericella nidulans
gaattcactgcggccgccatgatgtcattacggagtcgatgc

SEQ ID NO: 36845 - DNA, 43 bp, Emericella nidulans
gttctcgagacgagcgatcgccgcgacattcatcaagatactc

SEQ ID NO: 36846 - DNA, 44 bp, Emericella nidulans
gaattcactgcggccgccatgtcctaacgaccaccatcgaaagc

SEQ ID NO: 36847 - DNA, 49 bp, Emericella nidulans
gttctcgagacgagcgatcgcatggactcggtgagcgctagggctttgt

SEQ ID NO: 36848 - DNA, 41 bp, Emericella nidulans
gaattcactgcggccgccatgcgcgcagacgtctggggttt

SEQ ID NO: 36849 - DNA, 49 bp, Emericella nidulans
gttctcgagacgagcgatcgcccatatattgcactcttttgagccacga

SEQ ID NO: 36850 - DNA, 47 bp, Emericella nidulans
gaattcactgcggccgccatgcgtacaaggcatggaggagacataca

SEQ ID NO: 36851 - DNA, 45 bp, Emericella nidulans
gttctcgagacgagcgatcgctatggcgaaggctagactccatcg

SEQ ID NO: 36852 - DNA, 41 bp, Emericella nidulans
gaattcactgcggccgccatgggcaacggcggagaacgaca

SEQ ID NO: 36853 - DNA, 41 bp, Emericella nidulans
gttctcgagacgagcgatcgctcgcgcgcattctggagttg

SEQ ID NO: 36854 - DNA, 45 bp, Emericella nidulans
gaattcactgcggccgccatgaacagctgtctatacaggcttcct

SEQ ID NO: 36855 - DNA, 41 bp, Emericella nidulans
gttctcgagacgagcgatcgccgagatgatcgtacgcatgt

SEQ ID NO: 36856 - DNA, 41 bp, Emericella nidulans
gaattcactgcggccgccatgtgcagccgctgcttcaaacg

SEQ ID NO: 36857 - DNA, 46 bp, Emericella nidulans
gttctcgagacgagcgatcgccatattctttgcccccatattcacc

SEQ ID NO: 36858 - DNA, 49 bp, Emericella nidulans
gaattcactgcggccgccatgacaccagcccggctggtatataactttg

SEQ ID NO: 36859 - DNA, 47 bp, Emericella nidulans
gttctcgagacgagcgatcgcggcagagagggtgttgacaaatcagg

SEQ ID NO: 36860 - DNA, 49 bp, Emericella nidulans
gaattcactgcggccgccatgaaaaatgagaatacgaatacgaggtccc

SEQ ID NO: 36861 - DNA, 41 bp, Emericella nidulans
gttctcgagacgagcgatcgcccaccgccgatcgaagttca

SEQ ID NO: 36862 - DNA, 49 bp, Emericella nidulans
gaattcactgcggccgccatggtcgagtttgttctgactgtacctctca

SEQ ID NO: 36863 - DNA, 47 bp, Emericella nidulans
gttctcgagacgagcgatcgcgtttcttgtgcgcagatcgaataggg

SEQ ID NO: 36864 - DNA, 45 bp, Emericella nidulans
gaattcactgcggccgccatgcctccaaacactataagcagactc

SEQ ID NO: 36865 - DNA, 41 bp, Emericella nidulans
gttctcgagacgagcgatcgcgagctttcgacggtttctga

SEQ ID NO: 36866 - DNA, 43 bp, Emericella nidulans
gaattcactgcggccgccatgtgagtttcgtgacttcttcctg

SEQ ID NO: 36867 - DNA, 41 bp, Emericella nidulans
gttctcgagacgagcgatcgccgaaaaatttcggtgaagga

SEQ ID NO: 36868 - DNA, 42 bp, Emericella nidulans
gaattcactgcggccgccatgcaccgcccctcatctttccag

SEQ ID NO: 36869 - DNA, 49 bp, Emericella nidulans
gttctcgagacgagcgatcgcctgtagtaaccaggcagaataacgtgga

SEQ ID NO: 36870 - DNA, 42 bp, Emericella nidulans
gaattcactgcggccgccatgggctgccaaacacgcttgtcg

SEQ ID NO: 36871 - DNA, 43 bp, Emericella nidulans
gttctcgagacgagcgatcgcagtgagcgtagacccgccgtca

SEQ ID NO: 36872 - DNA, 41 bp, Emericella nidulans
gaattcactgcggccgccatgctctggcgaaatacgcttct

SEQ ID NO: 36873 - DNA, 43 bp, Emericella nidulans
gttctcgagacgagcgatcgcgtcaatgcccttgatctcaaac

SEQ ID NO: 36874 - DNA, 41 bp, Emericella nidulans
gaattcactgcggccgccatgtgccccgtctgcgtcagaaa

SEQ ID NO: 36875 - DNA, 45 bp, Emericella nidulans
gttctcgagacgagcgatcgctctcttttcgtcacgcttccaccc

SEQ ID NO: 36876 - DNA, 41 bp, Emericella nidulans
gaattcactgcggccgccatgtgcgttgcccactccccttc

SEQ ID NO: 36877 - DNA, 49 bp, Emericella nidulans
gttctcgagacgagcgatcgccgcatcctctacatcccatctagttgtt

SEQ ID NO: 36878 - DNA, 41 bp, Emericella nidulans
gaattcactgcggccgccatgttggtacggccttagctacc

SEQ ID NO: 36879 - DNA, 41 bp, Emericella nidulans
gttctcgagacgagcgatcgcaagggaatcctcggtgttgt

SEQ ID NO: 36880 - DNA, 49 bp, Emericella nidulans
gaattcactgcggccgccatgcgtcttctcaaatactggtttagctccc

SEQ ID NO: 36881 - DNA, 47 bp, Emericella nidulans
gttctcgagacgagcgatcgcgtggacttcgatccgagaaaccatgt

SEQ ID NO: 36882 - DNA, 41 bp, Emericella nidulans
gaattcactgcggccgccatgctgcgtgataagatcgatgg

SEQ ID NO: 36883 - DNA, 41 bp, Emericella nidulans
gttctcgagacgagcgatcgcctcttcctcagcacgcttct

SEQ ID NO: 36884 - DNA, 41 bp, Emericella nidulans
gaattcactgcggccgccatgcgaatgctggaacatctcaa

SEQ ID NO: 36885 - DNA, 41 bp, Emericella nidulans
gttctcgagacgagcgatcgcagttcgtcttgtcgctggat

SEQ ID NO: 36886 - DNA, 46 bp, Emericella nidulans
gaattcactgcggccgccatgttgatagcttcagggaggaaacagc

SEQ ID NO: 36887 - DNA, 49 bp, Emericella nidulans
gttctcgagacgagcgatcgcactcagacacttcaatgctgagttcttg

SEQ ID NO: 36888 - DNA, 49 bp, Emericella nidulans
gaattcactgcggccgccatgaaagagggttatcggtttaccgggggat

SEQ ID NO: 36889 - DNA, 42 bp, Emericella nidulans
gttctcgagacgagcgatcgccgcagcctcaacaggcttcaa

SEQ ID NO: 36890 - DNA, 48 bp, Emericella nidulans
gaattcactgcggccgccatgttaatgcaaaagccggggataatctca

SEQ ID NO: 36891 - DNA, 46 bp, Emericella nidulans
gttctcgagacgagcgatcgctttttgtgagacggtggacatttcg

SEQ ID NO: 36892 - DNA, 45 bp, Emericella nidulans
gaattcactgcggccgccatggtggaaaagagtctcgatcggtcc

SEQ ID NO: 36893 - DNA, 41 bp, Emericella nidulans
gttctcgagacgagcgatcgcgccgctgtgggactcgcatt

SEQ ID NO: 36894 - DNA, 41 bp, Emericella nidulans
gaattcactgcggccgccatgatactttggcgcctggagag

SEQ ID NO: 36895 - DNA, 45 bp, Emericella nidulans
gttctcgagacgagcgatcgcctctcgatatccttctccaacttt

SEQ ID NO: 36896 - DNA, 48 bp, Emericella nidulans
gaattcactgcggccgccatgatccaatcccaaatgagggagtttgtc

SEQ ID NO: 36897 - DNA, 41 bp, Emericella nidulans
gttctcgagacgagcgatcgcttcaactccgcctcgggcac

SEQ ID NO: 36898 - DNA, 41 bp, Emericella nidulans
gaattcactgcggccgccatgccgtgcgcgcaaggaaagat

SEQ ID NO: 36899 - DNA, 41 bp, Emericella nidulans
gttctcgagacgagcgatcgctgcgatgcctccgcaatgac

SEQ ID NO: 36900 - DNA, 42 bp, Emericella nidulans
gaattcactgcggccgccatgggtgctttcagacccccacga

SEQ ID NO: 36901 - DNA, 44 bp, Emericella nidulans
gttctcgagacgagcgatcgctgcactcaatatgctccgtctca

SEQ ID NO: 36902 - DNA, 41 bp, Emericella nidulans
gaattcactgcggccgccatgcctcatggttggtgatcctt

SEQ ID NO: 36903 - DNA, 42 bp, Emericella nidulans
gttctcgagacgagcgatcgccgagcgtttagactggtatga

SEQ ID NO: 36904 - DNA, 41 bp, Emericella nidulans
gaattcactgcggccgccatgtggcccgagcggtgttcttg

SEQ ID NO: 36905 - DNA, 42 bp, Emericella nidulans
gttctcgagacgagcgatcgcgggcgctgacgataggaaccc

SEQ ID NO: 36906 - DNA, 41 bp, Emericella nidulans
gaattcactgcggccgccatggccgtcatcctcgacaagca

SEQ ID NO: 36907 - DNA, 42 bp, Emericella nidulans
gttctcgagacgagcgatcgccgaggttgatccccgtccacc

SEQ ID NO: 36908 - DNA, 49 bp, Emericella nidulans
gaattcactgcggccgccatgtgaatacgttctcaatggctcgtaaacc

SEQ ID NO: 36909 - DNA, 48 bp, Emericella nidulans
gttctcgagacgagcgatcgcatcattgatacgtgcaatgagccagtc

SEQ ID NO: 36910 - DNA, 41 bp, Emericella nidulans
gaattcactgcggccgccatgtctggcaatgcgacccgatg

SEQ ID NO: 36911 - DNA, 46 bp, Emericella nidulans
gttctcgagacgagcgatcgcctctctcccagtccctcctctgtca

SEQ ID NO: 36912 - DNA, 45 bp, Emericella nidulans
gaattcactgcggccgccatggctggcgcatctgtctgtaccttc

SEQ ID NO: 36913 - DNA, 44 bp, Emericella nidulans
gttctcgagacgagcgatcgcatctcccattgcatccgtcaaga

SEQ ID NO: 36914 - DNA, 43 bp, Emericella nidulans
gaattcactgcggccgccatggccggtggttttcggactctca

SEQ ID NO: 36915 - DNA, 49 bp, Emericella nidulans
gttctcgagacgagcgatcgcagcttaatttggtacttgggatgtgtcc

SEQ ID NO: 36916 - DNA, 45 bp, Emericella nidulans
gaattcactgcggccgccatgtctgaccgagattgcatcggcata

SEQ ID NO: 36917 - DNA, 49 bp, Emericella nidulans
gttctcgagacgagcgatcgcccaagtagccaaaccatcttaggcgttg

SEQ ID NO: 36918 - DNA, 41 bp, Emericella nidulans
gaattcactgcggccgccatggccagacgttggcccgggta

SEQ ID NO: 36919 - DNA, 42 bp, Emericella nidulans
gttctcgagacgagcgatcgccccagctctttgcccaccttc

SEQ ID NO: 36920 - DNA, 41 bp, Emericella nidulans
gaattcactgcggccgccatgcatcgaccgtggaagaagat

SEQ ID NO: 36921 - DNA, 42 bp, Emericella nidulans
gttctcgagacgagcgatcgcctcgaactccccattttatga

SEQ ID NO: 36922 - DNA, 44 bp, Emericella nidulans
gaattcactgcggccgccatggaagaccgtgatcatgttatcca

SEQ ID NO: 36923 - DNA, 41 bp, Emericella nidulans
gttctcgagacgagcgatcgcaaacaccccaatcttcatcg

SEQ ID NO: 36924 - DNA, 41 bp, Emericella nidulans
gaattcactgcggccgccatgcgccaggaccgtgctcgaat

SEQ ID NO: 36925 - DNA, 47 bp, Emericella nidulans
gttctcgagacgagcgatcgccaccgaaattcacaacccccggtttc

SEQ ID NO: 36926 - DNA, 49 bp, Emericella nidulans
gaattcactgcggccgccatgtcacagatgacgctcaaagttcctatcc

SEQ ID NO: 36927 - DNA, 49 bp, Emericella nidulans
gttctcgagacgagcgatcgcgcagatcgaattcatccggggtgatctg

SEQ ID NO: 36928 - DNA, 45 bp, Emericella nidulans
gaattcactgcggccgccatgagggctaccctcaagagagactcg

SEQ ID NO: 36929 - DNA, 43 bp, Emericella nidulans
gttctcgagacgagcgatcgcttgttcgcatcgctctcggacc

SEQ ID NO: 36930 - DNA, 41 bp, Emericella nidulans
gaattcactgcggccgccatgccgatcttttccaacgctac

SEQ ID NO: 36931 - DNA, 47 bp, Emericella nidulans
gttctcgagacgagcgatcgcttagaaccatatcttgatcaattctt

SEQ ID NO: 36932 - DNA, 42 bp, Emericella nidulans
gaattcactgcggccgccatgcgtgatcaatccggcgtcgag

SEQ ID NO: 36933 - DNA, 45 bp, Emericella nidulans
gttctcgagacgagcgatcgcacttcttccactcgccaaatacca

SEQ ID NO: 36934 - DNA, 41 bp, Emericella nidulans
gaattcactgcggccgccatgagcaagagccagcgccatca

SEQ ID NO: 36935 - DNA, 41 bp, Emericella nidulans
gttctcgagacgagcgatcgcgaagaaggcgcaacggcaca

SEQ ID NO: 36936 - DNA, 41 bp, Emericella nidulans
gaattcactgcggccgccatggcgcgctttcagcacgaggt

SEQ ID NO: 36937 - DNA, 46 bp, Emericella nidulans
gttctcgagacgagcgatcgccagcaatgaacacccggttaatccc

SEQ ID NO: 36938 - DNA, 48 bp, Emericella nidulans
gaattcactgcggccgccatgacgtatacgctcatgatgcaccagcac

SEQ ID NO: 36939 - DNA, 41 bp, Emericella nidulans
gttctcgagacgagcgatcgcgggggatggagggggagatg

SEQ ID NO: 36940 - DNA, 41 bp, Emericella nidulans
gaattcactgcggccgccatgcagcccctcagcgctccagt

SEQ ID NO: 36941 - DNA, 43 bp, Emericella nidulans
gttctcgagacgagcgatcgcgggcaggtaatgcacccaagca

SEQ ID NO: 36942 - DNA, 46 bp, Emericella nidulans
gaattcactgcggccgccatgaagaacgatggtcccaagaagaaaa

SEQ ID NO: 36943 - DNA, 41 bp, Emericella nidulans
gttctcgagacgagcgatcgcggcaaatccgcccgaagcag

SEQ ID NO: 36944 - DNA, 41 bp, Emericella nidulans
gaattcactgcggccgccatgctcgtcctctccgccctccc

SEQ ID NO: 36945 - DNA, 44 bp, Emericella nidulans
gttctcgagacgagcgatcgcgccagcccctgaaactgtaagca

SEQ ID NO: 36946 - DNA, 41 bp, Emericella nidulans
gaattcactgcggccgccatgccagcagtatgctggtctca

SEQ ID NO: 36947 - DNA, 41 bp, Emericella nidulans
gttctcgagacgagcgatcgccttatccgggaaagcaggac

SEQ ID NO: 36948 - DNA, 45 bp, Emericella nidulans
gaattcactgcggccgccatgcgaatcctttgaacctggccttgc

SEQ ID NO: 36949 - DNA, 42 bp, Emericella nidulans
gttctcgagacgagcgatcgccctgctcaccatcccgcttca

SEQ ID NO: 36950 - DNA, 48 bp, Emericella nidulans
gaattcactgcggccgccatgccagtcgccacagttacttatggtttc

SEQ ID NO: 36951 - DNA, 41 bp, Emericella nidulans
gttctcgagacgagcgatcgctcggtccgcaggatgcgtta

SEQ ID NO: 36952 - DNA, 41 bp, Emericella nidulans
gaattcactgcggccgccatggccggtcaaggaccccgaag

SEQ ID NO: 36953 - DNA, 44 bp, Emericella nidulans
gttctcgagacgagcgatcgcaggtcgaaaggggtctgcccgta

SEQ ID NO: 36954 - DNA, 41 bp, Emericella nidulans
gaattcactgcggccgccatgtcccgcgccgtcttcttcaa

SEQ ID NO: 36955 - DNA, 46 bp, Emericella nidulans
gttctcgagacgagcgatcgccatctttgacagcctcagtcggaag

SEQ ID NO: 36956 - DNA, 45 bp, Emericella nidulans
gaattcactgcggccgccatgtgatccattagacggtacgctcct

SEQ ID NO: 36957 - DNA, 48 bp, Emericella nidulans
gttctcgagacgagcgatcgctgattgtctcgtcggtctttcatagtc

SEQ ID NO: 36958 - DNA, 43 bp, Emericella nidulans
gaattcactgcggccgccatgtcctatcatgattggcaagaga

SEQ ID NO: 36959 - DNA, 41 bp, Emericella nidulans
gttctcgagacgagcgatcgcatctgcggcaagttctgact

SEQ ID NO: 36960 - DNA, 41 bp, Emericella nidulans
gaattcactgcggccgccatgatccccgattgaagaaaagc

SEQ ID NO: 36961 - DNA, 41 bp, Emericella nidulans
gttctcgagacgagcgatcgcactgtgcttgcccagctaac

SEQ ID NO: 36962 - DNA, 41 bp, Emericella nidulans
gaattcactgcggccgccatgaagggcaggaccagataagc

SEQ ID NO: 36963 - DNA, 41 bp, Emericella nidulans
gttctcgagacgagcgatcgcgcttccagaccaatctccac

SEQ ID NO: 36964 - DNA, 41 bp, Emericella nidulans
gaattcactgcggccgccatgttcccgtgtgcttagctctt

SEQ ID NO: 36965 - DNA, 41 bp, Emericella nidulans
gttctcgagacgagcgatcgcgctccggtaccaatgatgag

SEQ ID NO: 36966 - DNA, 42 bp, Emericella nidulans
gaattcactgcggccgccatgcgaccccgctaacaacggata

SEQ ID NO: 36967 - DNA, 49 bp, Emericella nidulans
gttctcgagacgagcgatcgcaaatttgctcgctactcttgttctttcg

SEQ ID NO: 36968 - DNA, 49 bp, Emericella nidulans
gaattcactgcggccgccatgttttctttttcgtgacgattgttaatgc

SEQ ID NO: 36969 - DNA, 46 bp, Emericella nidulans
gttctcgagacgagcgatcgcaaaaacacattctctcgatccgtca

SEQ ID NO: 36970 - DNA, 41 bp, Emericella nidulans
gaattcactgcggccgccatggttcttcatcggtcgtgtca

SEQ ID NO: 36971 - DNA, 41 bp, Emericella nidulans
gttctcgagacgagcgatcgccagcacgggaaggtagtaga

SEQ ID NO: 36972 - DNA, 41 bp, Emericella nidulans
gaattcactgcggccgccatgaccagtctgcaggaaagagc

SEQ ID NO: 36973 - DNA, 41 bp, Emericella nidulans
gttctcgagacgagcgatcgctctaccccaactcgatccat

SEQ ID NO: 36974 - DNA, 46 bp, Emericella nidulans
gaattcactgcggccgccatgtcatactgagatcccttacctgttt

SEQ ID NO: 36975 - DNA, 41 bp, Emericella nidulans
gttctcgagacgagcgatcgcttcttcctccaagctttcca

SEQ ID NO: 36976 - DNA, 49 bp, Emericella nidulans
gaattcactgcggccgccatgcgatcctattactatccccaacaggatt

SEQ ID NO: 36977 - DNA, 49 bp, Emericella nidulans
gttctcgagacgagcgatcgcatgatagccaacaccgtcaaagcgcata

SEQ ID NO: 36978 - DNA, 42 bp, Emericella nidulans
gaattcactgcggccgccatggggcgacgatgagggagagga

SEQ ID NO: 36979 - DNA, 44 bp, Emericella nidulans
gttctcgagacgagcgatcgccggctggtcatctgaaaagtctg

SEQ ID NO: 36980 - DNA, 49 bp, Emericella nidulans
gaattcactgcggccgccatggaatgtgaatctcatttctctgacatcg

SEQ ID NO: 36981 - DNA, 42 bp, Emericella nidulans
gttctcgagacgagcgatcgccccaattccttgcgcagagcc

SEQ ID NO: 36982 - DNA, 48 bp, Emericella nidulans
gaattcactgcggccgccatgctgattttctcccagtccgatacattt

SEQ ID NO: 36983 - DNA, 46 bp, Emericella nidulans
gttctcgagacgagcgatcgcgtcaacctcaatacccttggcaatc

SEQ ID NO: 36984 - DNA, 41 bp, Emericella nidulans
gaattcactgcggccgccatgattgcagtttgcaccattga

SEQ ID NO: 36985 - DNA, 40 bp, Emericella nidulans
gttctcgagacgagcgatcgcgaatcccacgcctttgatg

SEQ ID NO: 36986 - DNA, 40 bp, Emericella nidulans
gaattcactgcggccgccatggcaaacgcgccctgtagcg

SEQ ID NO: 36987 - DNA, 41 bp, Emericella nidulans
gttctcgagacgagcgatcgcacaagggcggccttggtgct

SEQ ID NO: 36988 - DNA, 43 bp, Emericella nidulans
gaattcactgcggccgccatggctcacgctcaaagccctgtcc

SEQ ID NO: 36989 - DNA, 44 bp, Emericella nidulans
gttctcgagacgagcgatcgcgacggatgagaggaaggaggtgc

SEQ ID NO: 36990 - DNA, 40 bp, Emericella nidulans
gaattcactgcggccgccatgacaccatagctgctgcttc

SEQ ID NO: 36991 - DNA, 41 bp, Emericella nidulans
gttctcgagacgagcgatcgctcattggtagcaaggggttt

SEQ ID NO: 36992 - DNA, 41 bp, Emericella nidulans
gaattcactgcggccgccatgatgagagcgttgcgcactgg

SEQ ID NO: 36993 - DNA, 49 bp, Emericella nidulans
gttctcgagacgagcgatcgcctttctcttctttcaccgacgtcttttc

SEQ ID NO: 36994 - DNA, 41 bp, Emericella nidulans
gaattcactgcggccgccatgcccaagtggattttccgata

SEQ ID NO: 36995 - DNA, 46 bp, Emericella nidulans
gttctcgagacgagcgatcgccaaaacttctactctctccaactcc

SEQ ID NO: 36996 - DNA, 47 bp, Emericella nidulans
gaattcactgcggccgccatgcagtatcaactctaccagcatgattt

SEQ ID NO: 36997 - DNA, 41 bp, Emericella nidulans
gttctcgagacgagcgatcgctgcatcgtcgatgtggtaaa

SEQ ID NO: 36998 - DNA, 42 bp, Emericella nidulans
gaattcactgcggccgccatggcagcaactttgagcgcctcc

SEQ ID NO: 36999 - DNA, 49 bp, Emericella nidulans
gttctcgagacgagcgatcgcaacttcagccttgacaatctcacggaca

SEQ ID NO: 37000 - DNA, 48 bp, Emericella nidulans
gaattcactgcggccgccatgagactcttttgcatgatgccgagatcc

SEQ ID NO: 37001 - DNA, 43 bp, Emericella nidulans
gttctcgagacgagcgatcgctatctgtcgcgcagtcgcaatg

SEQ ID NO: 37002 - DNA, 48 bp, Emericella nidulans
gaattcactgcggccgccatgagggcagcaagaaaaagaagaaaaaca

SEQ ID NO: 37003 - DNA, 41 bp, Emericella nidulans
gttctcgagacgagcgatcgctggcatgcttggcgatggag

SEQ ID NO: 37004 - DNA, 41 bp, Emericella nidulans
gaattcactgcggccgccatgcccagcgggcttcgacgata

SEQ ID NO: 37005 - DNA, 41 bp, Emericella nidulans
gttctcgagacgagcgatcgcacggcatccgcagctgacac

SEQ ID NO: 37006 - DNA, 42 bp, Emericella nidulans
gaattcactgcggccgccatgcgtggcgggaggatacagtca

SEQ ID NO: 37007 - DNA, 47 bp, Emericella nidulans
gttctcgagacgagcgatcgcatgcgggttataatcaacgtgccaga

SEQ ID NO: 37008 - DNA, 43 bp, Emericella nidulans
gaattcactgcggccgccatgcgagcttcaggcccaatgtggt

SEQ ID NO: 37009 - DNA, 48 bp, Emericella nidulans
gttctcgagacgagcgatcgcagaatcctcagggatactggcgaatga

SEQ ID NO: 37010 - DNA, 49 bp, Emericella nidulans
gaattcactgcggccgccatgtacccagaaactcttgaaaccctctaca

SEQ ID NO: 37011 - DNA, 41 bp, Emericella nidulans
gttctcgagacgagcgatcgccggacgcgctaactgggctc

SEQ ID NO: 37012 - DNA, 44 bp, Emericella nidulans
gaattcactgcggccgccatggtgggctgacttcagtctacaag

SEQ ID NO: 37013 - DNA, 41 bp, Emericella nidulans
gttctcgagacgagcgatcgcctggttccttctgagctggt

SEQ ID NO: 37014 - DNA, 46 bp, Emericella nidulans
gaattcactgcggccgccatgaatcacgtcccctctccagaatcag

SEQ ID NO: 37015 - DNA, 47 bp, Emericella nidulans
gttctcgagacgagcgatcgctcctgagcttcttcaggttgttcctg

SEQ ID NO: 37016 - DNA, 49 bp, Emericella nidulans
gaattcactgcggccgccatgagcgcacactgtatctcatctcatctca

SEQ ID NO: 37017 - DNA, 47 bp, Emericella nidulans
gttctcgagacgagcgatcgcccgttaaacaagctatggagcagacc

SEQ ID NO: 37018 - DNA, 49 bp, Emericella nidulans
gaattcactgcggccgccatgactgacagtaacagcatcttctcggtcc

SEQ ID NO: 37019 - DNA, 44 bp, Emericella nidulans
gttctcgagacgagcgatcgcccttgcctcgtccagtagaggtc

SEQ ID NO: 37020 - DNA, 45 bp, Emericella nidulans
gaattcactgcggccgccatgccctgtaaaacctggggtttagtt

SEQ ID NO: 37021 - DNA, 41 bp, Emericella nidulans
gttctcgagacgagcgatcgcacatcgttgacgaaggtcag

SEQ ID NO: 37022 - DNA, 43 bp, Emericella nidulans
gaattcactgcggccgccatggagtcggcgcatatggcgttgt

SEQ ID NO: 37023 - DNA, 44 bp, Emericella nidulans
gttctcgagacgagcgatcgcaggggtcattgggttaagcgtga

SEQ ID NO: 37024 - DNA, 41 bp, Emericella nidulans
gaattcactgcggccgccatggacagacaagatgccggagt

SEQ ID NO: 37025 - DNA, 41 bp, Emericella nidulans
gttctcgagacgagcgatcgcgactgtttcagctgctcacg

SEQ ID NO: 37026 - DNA, 49 bp, Emericella nidulans
gaattcactgcggccgccatgcgctaacaactactgggtttgtctatcc

SEQ ID NO: 37027 - DNA, 49 bp, Emericella nidulans
gttctcgagacgagcgatcgcgaaagtaagggtctgaccagcagttcca

SEQ ID NO: 37028 - DNA, 49 bp, Emericella nidulans
gaattcactgcggccgccatggaagctcgtaagggtaagtcatccaacg

SEQ ID NO: 37029 - DNA, 46 bp, Emericella nidulans
gttctcgagacgagcgatcgcatcggaagatccttgtcttggagcc

SEQ ID NO: 37030 - DNA, 45 bp, Emericella nidulans
gaattcactgcggccgccatggccatggctgaagtcacagagtcc

SEQ ID NO: 37031 - DNA, 40 bp, Emericella nidulans
gttctcgagacgagcgatcgcgttggtgcccacgcaggga

SEQ ID NO: 37032 - DNA, 49 bp, Emericella nidulans
gaattcactgcggccgccatgatggctcttcaccagtacgactggattc

SEQ ID NO: 37033 - DNA, 41 bp, Emericella nidulans
gttctcgagacgagcgatcgccgatgagcatggcgaggagg

SEQ ID NO: 37034 - DNA, 46 bp, Emericella nidulans
gaattcactgcggccgccatgatccacgcgacaagcaagttaacag

SEQ ID NO: 37035 - DNA, 45 bp, Emericella nidulans
gttctcgagacgagcgatcgcaccaccagcgtacttcctcgtcca

SEQ ID NO: 37036 - DNA, 49 bp, Emericella nidulans
gaattcactgcggccgccatgaatctcataaaacaagatggcaaccaac

SEQ ID NO: 37037 - DNA, 41 bp, Emericella nidulans
gttctcgagacgagcgatcgcggcggggacgacggtgtaga

SEQ ID NO: 37038 - DNA, 41 bp, Emericella nidulans
gaattcactgcggccgccatgagaccgctctcgactttcaa

SEQ ID NO: 37039 - DNA, 41 bp, Emericella nidulans
gttctcgagacgagcgatcgcctcctggtcacgaagtagcc

SEQ ID NO: 37040 - DNA, 41 bp, Emericella nidulans
gaattcactgcggccgccatgcaaccggacgatctcaagac

SEQ ID NO: 37041 - DNA, 48 bp, Emericella nidulans
gttctcgagacgagcgatcgcgtccttcaagatataaacatgcccaaa

SEQ ID NO: 37042 - DNA, 41 bp, Emericella nidulans
gaattcactgcggccgccatgtccagtcccgcccttgcttg

SEQ ID NO: 37043 - DNA, 49 bp, Emericella nidulans
gttctcgagacgagcgatcgctctttatgcattgtcttcatcggtatcc

SEQ ID NO: 37044 - DNA, 49 bp, Emericella nidulans
gaattcactgcggccgccatggattctcaaatgtgcgttcttcgaggct

SEQ ID NO: 37045 - DNA, 45 bp, Emericella nidulans
gttctcgagacgagcgatcgcttctcgtgatttcttcgcgccttg

SEQ ID NO: 37046 - DNA, 41 bp, Emericella nidulans
gaattcactgcggccgccatgtcaactgctccgatatgtgc

SEQ ID NO: 37047 - DNA, 41 bp, Emericella nidulans
gttctcgagacgagcgatcgcccttggtcttggcataggtg

SEQ ID NO: 37048 - DNA, 41 bp, Emericella nidulans
gaattcactgcggccgccatgcccgacaagatcgcggacca

SEQ ID NO: 37049 - DNA, 41 bp, Emericella nidulans
gttctcgagacgagcgatcgcccagcatcaccctggggacc

SEQ ID NO: 37050 - DNA, 41 bp, Emericella nidulans
gaattcactgcggccgccatgattatgccgatggaaagctg

SEQ ID NO: 37051 - DNA, 43 bp, Emericella nidulans
gttctcgagacgagcgatcgctcgaggtcgatgtagacaaaag

SEQ ID NO: 37052 - DNA, 42 bp, Emericella nidulans
gaattcactgcggccgccatgtcagcgacggggagattgatg

SEQ ID NO: 37053 - DNA, 43 bp, Emericella nidulans
gttctcgagacgagcgatcgctcaccccacagacgctcaagca

SEQ ID NO: 37054 - DNA, 41 bp, Emericella nidulans
gaattcactgcggccgccatgctgattgctcgtcccggtcc

SEQ ID NO: 37055 - DNA, 46 bp, Emericella nidulans
gttctcgagacgagcgatcgcgatccccacaccaaaactgaaagtg

SEQ ID NO: 37056 - DNA, 49 bp, Emericella nidulans
gaattcactgcggccgccatgtattactaattaattataaggtggagca

SEQ ID NO: 37057 - DNA, 41 bp, Emericella nidulans
gttctcgagacgagcgatcgcagaggatcccccaatgaaac

SEQ ID NO: 37058 - DNA, 49 bp, Emericella nidulans
gaattcactgcggccgccatgaccgtcttaccaacttctaccagaatca

SEQ ID NO: 37059 - DNA, 41 bp, Emericella nidulans
gttctcgagacgagcgatcgccccagtcgcgatagcggagc

SEQ ID NO: 37060 - DNA, 45 bp, Emericella nidulans
gaattcactgcggccgccatgttctcctaccctcaatcgtgatgc

SEQ ID NO: 37061 - DNA, 41 bp, Emericella nidulans
gttctcgagacgagcgatcgctggcagatcaacggcacggt

SEQ ID NO: 37062 - DNA, 47 bp, Emericella nidulans
gaattcactgcggccgccatggtatggaacatgaaatatctcaaagg

SEQ ID NO: 37063 - DNA, 41 bp, Emericella nidulans
gttctcgagacgagcgatcgcccgagcttgacctcattttg

SEQ ID NO: 37064 - DNA, 42 bp, Emericella nidulans
gaattcactgcggccgccatgcgacaccatggcgttgcccta

SEQ ID NO: 37065 - DNA, 46 bp, Emericella nidulans
gttctcgagacgagcgatcgctgtcagttcgtgcgcgacgataggt

SEQ ID NO: 37066 - DNA, 39 bp, Emericella nidulans
gaattcactgcggccgccatgacttgccggtggcttttt

SEQ ID NO: 37067 - DNA, 44 bp, Emericella nidulans
gttctcgagacgagcgatcgcgtcaaggttagctctatcgcatt

SEQ ID NO: 37068 - DNA, 49 bp, Emericella nidulans
gaattcactgcggccgccatgtccccagcatgtgcagcatgctctttta

SEQ ID NO: 37069 - DNA, 42 bp, Emericella nidulans
gttctcgagacgagcgatcgccacgttgcttagccggtgtcg

SEQ ID NO: 37070 - DNA, 43 bp, Emericella nidulans
gaattcactgcggccgccatgcgtctaagccaggcgaaaatga

SEQ ID NO: 37071 - DNA, 43 bp, Emericella nidulans
gttctcgagacgagcgatcgcgcgcatctctttccgcagaagt

SEQ ID NO: 37072 - DNA, 46 bp, Emericella nidulans
gaattcactgcggccgccatgctgcttttggaatcatgctgggtga

SEQ ID NO: 37073 - DNA, 40 bp, Emericella nidulans
gttctcgagacgagcgatcgctggcggtgcgagtctgctc

SEQ ID NO: 37074 - DNA, 46 bp, Emericella nidulans
gaattcactgcggccgccatgattcacaaactcgggatctgaaggt

SEQ ID NO: 37075 - DNA, 41 bp, Emericella nidulans
gttctcgagacgagcgatcgcgtcggggctctcgccaaaga

SEQ ID NO: 37076 - DNA, 41 bp, Emericella nidulans
gaattcactgcggccgccatgtgctgccctcgatgctctcg

SEQ ID NO: 37077 - DNA, 41 bp, Emericella nidulans
gttctcgagacgagcgatcgctgtgcaagcttggccagcag

SEQ ID NO: 37078 - DNA, 49 bp, Emericella nidulans
gaattcactgcggccgccatgaatgttgaaaatgcctcatatcccgttg

SEQ ID NO: 37079 - DNA, 49 bp, Emericella nidulans
gttctcgagacgagcgatcgcatcagtagtttgactccaggaagcgaca

SEQ ID NO: 37080 - DNA, 42 bp, Emericella nidulans
gaattcactgcggccgccatggcgtagcgacgaccctgtcca

SEQ ID NO: 37081 - DNA, 48 bp, Emericella nidulans
gttctcgagacgagcgatcgcatcgattcttctggtgaatacctctgg

SEQ ID NO: 37082 - DNA, 41 bp, Emericella nidulans
gaattcactgcggccgccatggaatgatcctgccttttgga

SEQ ID NO: 37083 - DNA, 41 bp, Emericella nidulans
gttctcgagacgagcgatcgcactcatcaacgtcccaatcg

SEQ ID NO: 37084 - DNA, 41 bp, Emericella nidulans
gaattcactgcggccgccatgggcacggacgttgccaaaga

SEQ ID NO: 37085 - DNA, 44 bp, Emericella nidulans
gttctcgagacgagcgatcgcgccgtcgctgcagcgattggtag

SEQ ID NO: 37086 - DNA, 45 bp, Emericella nidulans
gaattcactgcggccgccatgtgtcggaacaagaaccgtcttctg

SEQ ID NO: 37087 - DNA, 47 bp, Emericella nidulans
gttctcgagacgagcgatcgcaccaatcttcgcattcgaaaagtcca

SEQ ID NO: 37088 - DNA, 49 bp, Emericella nidulans
gaattcactgcggccgccatgaaactgacaatgatcaagtgaaggatca

SEQ ID NO: 37089 - DNA, 41 bp, Emericella nidulans
gttctcgagacgagcgatcgccccggcatgcaggagcacat

SEQ ID NO: 37090 - DNA, 49 bp, Emericella nidulans
gaattcactgcggccgccatggagacaggtagcggtaagagtacgcaat

SEQ ID NO: 37091 - DNA, 49 bp, Emericella nidulans
gttctcgagacgagcgatcgctggtaaaaagatcaagatgcccccaggt

SEQ ID NO: 37092 - DNA, 44 bp, Emericella nidulans
gaattcactgcggccgccatgtcgccatgattcagcacaccaac

SEQ ID NO: 37093 - DNA, 49 bp, Emericella nidulans
gttctcgagacgagcgatcgctctgaatgtttcagctactcttttgctg

SEQ ID NO: 37094 - DNA, 41 bp, Emericella nidulans
gaattcactgcggccgccatgccaaaggaggaaggaaaagg

SEQ ID NO: 37095 - DNA, 41 bp, Emericella nidulans
gttctcgagacgagcgatcgctcttggacgtttgtctgtcg

SEQ ID NO: 37096 - DNA, 41 bp, Emericella nidulans
gaattcactgcggccgccatggtctgttagcggccattgtt

SEQ ID NO: 37097 - DNA, 40 bp, Emericella nidulans
gttctcgagacgagcgatcgccagctcgggtaaggtacgg

SEQ ID NO: 37098 - DNA, 48 bp, Emericella nidulans
gaattcactgcggccgccatgttccgatcattttagtatagcttcttt

SEQ ID NO: 37099 - DNA, 41 bp, Emericella nidulans
gttctcgagacgagcgatcgcgtgatcgaaatgctggaggt

SEQ ID NO: 37100 - DNA, 47 bp, Emericella nidulans
gaattcactgcggccgccatgaagtctaatctctccacaaggcatga

SEQ ID NO: 37101 - DNA, 41 bp, Emericella nidulans
gttctcgagacgagcgatcgcttttggtcaagagagcacga

SEQ ID NO: 37102 - DNA, 41 bp, Emericella nidulans
gaattcactgcggccgccatgtctcgatgccaccggtgctg

SEQ ID NO: 37103 - DNA, 46 bp, Emericella nidulans
gttctcgagacgagcgatcgcccctggtccgtaaatgacgcttttg

SEQ ID NO: 37104 - DNA, 43 bp, Emericella nidulans
gaattcactgcggccgccatggcctctggtcgaggaaggggag

SEQ ID NO: 37105 - DNA, 48 bp, Emericella nidulans
gttctcgagacgagcgatcgctccaccagatattcatcaaacttcctg

SEQ ID NO: 37106 - DNA, 49 bp, Emericella nidulans
gaattcactgcggccgccatgtggtatgtctgcgtcttacctgcccctc

SEQ ID NO: 37107 - DNA, 41 bp, Emericella nidulans
gttctcgagacgagcgatcgccggcacaattcggcacctcc

SEQ ID NO: 37108 - DNA, 45 bp, Emericella nidulans
gaattcactgcggccgccatgagatgcagaaaagggcggtattgc

SEQ ID NO: 37109 - DNA, 46 bp, Emericella nidulans
gttctcgagacgagcgatcgccatccggaaaacaccgaatttcgtc

SEQ ID NO: 37110 - DNA, 45 bp, Emericella nidulans
gaattcactgcggccgccatgtctggatgccttgcaggacctttc

SEQ ID NO: 37111 - DNA, 48 bp, Emericella nidulans
gttctcgagacgagcgatcgctattatccttttccagtgtgtccagca

SEQ ID NO: 37112 - DNA, 41 bp, Emericella nidulans
gaattcactgcggccgccatgggtgacctcccgcgccttct

SEQ ID NO: 37113 - DNA, 46 bp, Emericella nidulans
gttctcgagacgagcgatcgcgacccgtgatctcaggaaactcagc

SEQ ID NO: 37114 - DNA, 44 bp, Emericella nidulans
gaattcactgcggccgccatgggttgggtggaattttgggttga

SEQ ID NO: 37115 - DNA, 47 bp, Emericella nidulans
gttctcgagacgagcgatcgcggatcgtgttaggatggccgccgtag

SEQ ID NO: 37116 - DNA, 43 bp, Emericella nidulans
gaattcactgcggccgccatgaagcatgatatcgaccggcagt

SEQ ID NO: 37117 - DNA, 49 bp, Emericella nidulans
gttctcgagacgagcgatcgcgatggaataaatggcgatataggcgagt

SEQ ID NO: 37118 - DNA, 44 bp, Emericella nidulans
gaattcactgcggccgccatgtggatcgatgacgagaagggaga

SEQ ID NO: 37119 - DNA, 44 bp, Emericella nidulans
gttctcgagacgagcgatcgctattttgccaccactcgcacatt

SEQ ID NO: 37120 - DNA, 46 bp, Emericella nidulans
gaattcactgcggccgccatgcaatgtcatccatgacgcagaatcg

SEQ ID NO: 37121 - DNA, 49 bp, Emericella nidulans
gttctcgagacgagcgatcgctccctttctaacctcctctctgaccttc

SEQ ID NO: 37122 - DNA, 49 bp, Emericella nidulans
gaattcactgcggccgccatgactcgattgcaatgaaacaataccttcg

SEQ ID NO: 37123 - DNA, 41 bp, Emericella nidulans
gttctcgagacgagcgatcgcggtggttcgcgccccattct

SEQ ID NO: 37124 - DNA, 41 bp, Emericella nidulans
gaattcactgcggccgccatgccagccagacgggacggaga

SEQ ID NO: 37125 - DNA, 48 bp, Emericella nidulans
gttctcgagacgagcgatcgcccattcgatattgtgcgctgcggctta

SEQ ID NO: 37126 - DNA, 41 bp, Emericella nidulans
gaattcactgcggccgccatgttgatggaggcggcgtttgc

SEQ ID NO: 37127 - DNA, 42 bp, Emericella nidulans
gttctcgagacgagcgatcgccacttctggccgagggcatcc

SEQ ID NO: 37128 - DNA, 41 bp, Emericella nidulans
gaattcactgcggccgccatgccacaagactcgcgcggtga

SEQ ID NO: 37129 - DNA, 49 bp, Emericella nidulans
gttctcgagacgagcgatcgcactctttatcatcttcccaactgcctgt

SEQ ID NO: 37130 - DNA, 42 bp, Emericella nidulans
gaattcactgcggccgccatgcatcgtcgagcgaagcgggac

SEQ ID NO: 37131 - DNA, 43 bp, Emericella nidulans
gttctcgagacgagcgatcgcgccgtcggttgtgtcgtaccgt

SEQ ID NO: 37132 - DNA, 45 bp, Emericella nidulans
gaattcactgcggccgccatggggattgtggagggtgagtctagc

SEQ ID NO: 37133 - DNA, 41 bp, Emericella nidulans
gttctcgagacgagcgatcgccgggaagccatcaccgtgga

SEQ ID NO: 37134 - DNA, 39 bp, Emericella nidulans
gaattcactgcggccgccatggcagctgcgcggggatca

SEQ ID NO: 37135 - DNA, 44 bp, Emericella nidulans
gttctcgagacgagcgatcgccgctttgtcgcagatctggtcct

SEQ ID NO: 37136 - DNA, 41 bp, Emericella nidulans
gaattcactgcggccgccatgcgccgccgccactctctcta

SEQ ID NO: 37137 - DNA, 42 bp, Emericella nidulans
gttctcgagacgagcgatcgccaaccgctcatcatcgtctgc

SEQ ID NO: 37138 - DNA, 49 bp, Emericella nidulans
gaattcactgcggccgccatgtaaggaggagctcattatcgacggggtc

SEQ ID NO: 37139 - DNA, 41 bp, Emericella nidulans
gttctcgagacgagcgatcgcccgacacaccagcggcatca

SEQ ID NO: 37140 - DNA, 45 bp, Emericella nidulans
gaattcactgcggccgccatgctcacaaaacccgacctgtttgtt

SEQ ID NO: 37141 - DNA, 48 bp, Emericella nidulans
gttctcgagacgagcgatcgcatctgacaatcaccatctccccattcg

SEQ ID NO: 37142 - DNA, 43 bp, Emericella nidulans
gaattcactgcggccgccatgggcgtagcatggcgacgcttat

SEQ ID NO: 37143 - DNA, 48 bp, Emericella nidulans
gttctcgagacgagcgatcgccgagagcaaacaagtagctcggaatgg

SEQ ID NO: 37144 - DNA, 41 bp, Emericella nidulans
gaattcactgcggccgccatggcaggtgacgcggatgctga

SEQ ID NO: 37145 - DNA, 41 bp, Emericella nidulans
gttctcgagacgagcgatcgccgcccacaaaccccagttgc

SEQ ID NO: 37146 - DNA, 41 bp, Emericella nidulans
gaattcactgcggccgccatgccagccggtcaatgttttat

SEQ ID NO: 37147 - DNA, 40 bp, Emericella nidulans
gttctcgagacgagcgatcgctcgccgctctagttccttt

SEQ ID NO: 37148 - DNA, 41 bp, Emericella nidulans
gaattcactgcggccgccatgcatttgcggacccgatggat

SEQ ID NO: 37149 - DNA, 41 bp, Emericella nidulans
gttctcgagacgagcgatcgcttcgccctcccgagatgcag

SEQ ID NO: 37150 - DNA, 46 bp, Emericella nidulans
gaattcactgcggccgccatgatacaagggcagtgtcccaagagcc

SEQ ID NO: 37151 - DNA, 44 bp, Emericella nidulans
gttctcgagacgagcgatcgcaaccactccatcccaactccaca

SEQ ID NO: 37152 - DNA, 41 bp, Emericella nidulans
gaattcactgcggccgccatggcaccccgcagcttccaaga

SEQ ID NO: 37153 - DNA, 41 bp, Emericella nidulans
gttctcgagacgagcgatcgcgcggaccaagccaagctcca

SEQ ID NO: 37154 - DNA, 42 bp, Emericella nidulans
gaattcactgcggccgccatgggcctaaaaccaggcttaaaa

SEQ ID NO: 37155 - DNA, 41 bp, Emericella nidulans
gttctcgagacgagcgatcgcacaagagcagctctccaggt

SEQ ID NO: 37156 - DNA, 42 bp, Emericella nidulans
gaattcactgcggccgccatgaatataaggatgcccaagctg

SEQ ID NO: 37157 - DNA, 43 bp, Emericella nidulans
gttctcgagacgagcgatcgcgcgattattcccattaagaacc

SEQ ID NO: 37158 - DNA, 43 bp, Emericella nidulans
gaattcactgcggccgccatggcccctctacgtgatgggatcg

SEQ ID NO: 37159 - DNA, 49 bp, Emericella nidulans
gttctcgagacgagcgatcgcgtttagtcagctttcatgagcggccata

SEQ ID NO: 37160 - DNA, 48 bp, Emericella nidulans
gaattcactgcggccgccatggacaagatgcctctgataacgctcaca

SEQ ID NO: 37161 - DNA, 41 bp, Emericella nidulans
gttctcgagacgagcgatcgcaaggccggcctcgttcttga

SEQ ID NO: 37162 - DNA, 41 bp, Emericella nidulans
gaattcactgcggccgccatgcgaatggctacaagacacca

SEQ ID NO: 37163 - DNA, 41 bp, Emericella nidulans
gttctcgagacgagcgatcgccgaataagcaagggctgttc

SEQ ID NO: 37164 - DNA, 49 bp, Emericella nidulans
gaattcactgcggccgccatgcaagcaagatagaaccgtagatgatccc

SEQ ID NO: 37165 - DNA, 44 bp, Emericella nidulans
gttctcgagacgagcgatcgctcatccgctggtgtcgttttaga

SEQ ID NO: 37166 - DNA, 42 bp, Emericella nidulans
gaattcactgcggccgccatggtctttcattccgcgcgcctc

SEQ ID NO: 37167 - DNA, 45 bp, Emericella nidulans
gttctcgagacgagcgatcgctcatccccttttccaattccaccc

SEQ ID NO: 37168 - DNA, 49 bp, Emericella nidulans
gaattcactgcggccgccatggccacaagctacttagtacctacgctcc

SEQ ID NO: 37169 - DNA, 47 bp, Emericella nidulans
gttctcgagacgagcgatcgcaactccgacgggaaaccgtctcctca

SEQ ID NO: 37170 - DNA, 41 bp, Emericella nidulans
gaattcactgcggccgccatgctgccgtgctctgcctggtg

SEQ ID NO: 37171 - DNA, 48 bp, Emericella nidulans
gttctcgagacgagcgatcgcgatagggaactgtagcgaaatctggaa

SEQ ID NO: 37172 - DNA, 41 bp, Emericella nidulans
gaattcactgcggccgccatgccagagcaccccgccatcaa

SEQ ID NO: 37173 - DNA, 41 bp, Emericella nidulans
gttctcgagacgagcgatcgcgcccgcaggaacctcgtcct

SEQ ID NO: 37174 - DNA, 49 bp, Emericella nidulans
gaattcactgcggccgccatgccaccatggacgtgatcatggatggttt

SEQ ID NO: 37175 - DNA, 48 bp, Emericella nidulans
gttctcgagacgagcgatcgctccttgccatacttcttcttgcatttc

SEQ ID NO: 37176 - DNA, 49 bp, Emericella nidulans
gaattcactgcggccgccatgagcgtgatggaatttctccctaaaggat

SEQ ID NO: 37177 - DNA, 45 bp, Emericella nidulans
gttctcgagacgagcgatcgcacaccaacatccatctagcgaacc

SEQ ID NO: 37178 - DNA, 45 bp, Emericella nidulans
gaattcactgcggccgccatgacgacatatgagcatggtgtccaa

SEQ ID NO: 37179 - DNA, 49 bp, Emericella nidulans
gttctcgagacgagcgatcgcttaacctcgaagaccgttttgagtaagc

SEQ ID NO: 37180 - DNA, 43 bp, Emericella nidulans
gaattcactgcggccgccatgggacacgccggtcattgatgtg

SEQ ID NO: 37181 - DNA, 49 bp, Emericella nidulans
gttctcgagacgagcgatcgcctgtaaaatgtcgctcagtgtaagaacg

SEQ ID NO: 37182 - DNA, 46 bp, Emericella nidulans
gaattcactgcggccgccatgtacaaggaaggccctgagcctgggt

SEQ ID NO: 37183 - DNA, 41 bp, Emericella nidulans
gttctcgagacgagcgatcgccgctttggccgccaacttct

SEQ ID NO: 37184 - DNA, 48 bp, Emericella nidulans
gaattcactgcggccgccatgggactatccagcttatcgagcccattg

SEQ ID NO: 37185 - DNA, 47 bp, Emericella nidulans
gttctcgagacgagcgatcgctccgtgaatgagaactcgaactgatg

SEQ ID NO: 37186 - DNA, 41 bp, Emericella nidulans
gaattcactgcggccgccatgaagagtgcgctggagtccta

SEQ ID NO: 37187 - DNA, 41 bp, Emericella nidulans
gttctcgagacgagcgatcgcatatttcgggaaatggcctc

SEQ ID NO: 37188 - DNA, 45 bp, Emericella nidulans
gaattcactgcggccgccatggggtgaggtcgtaatttgggagtc

SEQ ID NO: 37189 - DNA, 44 bp, Emericella nidulans
gttctcgagacgagcgatcgcacctcctgtggcttccctgtaga

SEQ ID NO: 37190 - DNA, 41 bp, Emericella nidulans
gaattcactgcggccgccatgatgtcgacgacggcggggtt

SEQ ID NO: 37191 - DNA, 46 bp, Emericella nidulans
gttctcgagacgagcgatcgcggggaggactgataagcggtttacg

SEQ ID NO: 37192 - DNA, 41 bp, Emericella nidulans
gaattcactgcggccgccatgctgctgttatcacgctccag

SEQ ID NO: 37193 - DNA, 41 bp, Emericella nidulans
gttctcgagacgagcgatcgcgcgggatagcaacaattagc

SEQ ID NO: 37194 - DNA, 45 bp, Emericella nidulans
gaattcactgcggccgccatgagtatcaccgtctcaggcgatcaa

SEQ ID NO: 37195 - DNA, 46 bp, Emericella nidulans
gttctcgagacgagcgatcgcggctgcctagaaggtcatgtggtgg

SEQ ID NO: 37196 - DNA, 49 bp, Emericella nidulans
gaattcactgcggccgccatgtttctctcgcgtaaggcgacgctcgata

SEQ ID NO: 37197 - DNA, 49 bp, Emericella nidulans
gttctcgagacgagcgatcgcaagctgaaaatagatcaaactccggaaa

SEQ ID NO: 37198 - DNA, 46 bp, Emericella nidulans
gaattcactgcggccgccatgtcagtgggggatcaagttgagaacg

SEQ ID NO: 37199 - DNA, 47 bp, Emericella nidulans
gttctcgagacgagcgatcgcagctttcatcgtcgtgcgcatcaaat

SEQ ID NO: 37200 - DNA, 41 bp, Emericella nidulans
gaattcactgcggccgccatgcgcaaagcttgtcgtgtatg

SEQ ID NO: 37201 - DNA, 39 bp, Emericella nidulans
gttctcgagacgagcgatcgcgggtcccatggtagtccc

SEQ ID NO: 37202 - DNA, 49 bp, Emericella nidulans
gaattcactgcggccgccatgtacttctttgaagtgtgggaccgccttg

SEQ ID NO: 37203 - DNA, 47 bp, Emericella nidulans
gttctcgagacgagcgatcgcctgctggttgaagatcaggacccgta

SEQ ID NO: 37204 - DNA, 44 bp, Emericella nidulans
gaattcactgcggccgccatgccgtaagctacccctctctgggt

SEQ ID NO: 37205 - DNA, 47 bp, Emericella nidulans
gttctcgagacgagcgatcgctcgaagagaaaaacgtctggcgtacc

SEQ ID NO: 37206 - DNA, 41 bp, Emericella nidulans
gaattcactgcggccgccatgatacgacaaagcttcgcacc

SEQ ID NO: 37207 - DNA, 46 bp, Emericella nidulans
gttctcgagacgagcgatcgcccactcacctgtagttgagtggata

SEQ ID NO: 37208 - DNA, 41 bp, Emericella nidulans
gaattcactgcggccgccatgcgctgcggctggttcgatct

SEQ ID NO: 37209 - DNA, 46 bp, Emericella nidulans
gttctcgagacgagcgatcgccatctactcacggcaaatcatgtcg

SEQ ID NO: 37210 - DNA, 41 bp, Emericella nidulans
gaattcactgcggccgccatggagagggtacgtttgcggta

SEQ ID NO: 37211 - DNA, 41 bp, Emericella nidulans
gttctcgagacgagcgatcgccgcttgtcgaaagtcagttg

SEQ ID NO: 37212 - DNA, 41 bp, Emericella nidulans
gaattcactgcggccgccatgtctgcgaaaccgccacgaga

SEQ ID NO: 37213 - DNA, 45 bp, Emericella nidulans
gttctcgagacgagcgatcgccgtttcagtccgtcctcctctagc

SEQ ID NO: 37214 - DNA, 41 bp, Emericella nidulans
gaattcactgcggccgccatggcgctgccagtgcagaagga

SEQ ID NO: 37215 - DNA, 41 bp, Emericella nidulans
gttctcgagacgagcgatcgcttccgctgcgaccaggttca

SEQ ID NO: 37216 - DNA, 48 bp, Emericella nidulans
gaattcactgcggccgccatgccaatcttatatggcgaatcctgacca

SEQ ID NO: 37217 - DNA, 48 bp, Emericella nidulans
gttctcgagacgagcgatcgccgtttttgaagaggtcatctggcactg

SEQ ID NO: 37218 - DNA, 44 bp, Emericella nidulans
gaattcactgcggccgccatgtctggaagcaagatcttcatatt

SEQ ID NO: 37219 - DNA, 41 bp, Emericella nidulans
gttctcgagacgagcgatcgcttgggcctggttcatatgtc

SEQ ID NO: 37220 - DNA, 41 bp, Emericella nidulans
gaattcactgcggccgccatgtcctagataacgccgcattg

SEQ ID NO: 37221 - DNA, 41 bp, Emericella nidulans
gttctcgagacgagcgatcgcgcatctgggtcgaggtagtt

SEQ ID NO: 37222 - DNA, 41 bp, Emericella nidulans
gaattcactgcggccgccatgtccgaaactaccgtgacctc

SEQ ID NO: 37223 - DNA, 41 bp, Emericella nidulans
gttctcgagacgagcgatcgcctataactgggccctgaaaa

SEQ ID NO: 37224 - DNA, 49 bp, Emericella nidulans
gaattcactgcggccgccatgatctcttttctccctcagtggcaaaact

SEQ ID NO: 37225 - DNA, 43 bp, Emericella nidulans
gttctcgagacgagcgatcgctccccatccaacctccatcgac

SEQ ID NO: 37226 - DNA, 49 bp, Emericella nidulans
gaattcactgcggccgccatgatttatggcacattcaactcggcgattc

SEQ ID NO: 37227 - DNA, 47 bp, Emericella nidulans
gttctcgagacgagcgatcgccttcaagccattcatccaggcgacga

SEQ ID NO: 37228 - DNA, 42 bp, Emericella nidulans
gaattcactgcggccgccatgcccagtgacaggcccggactc

SEQ ID NO: 37229 - DNA, 44 bp, Emericella nidulans
gttctcgagacgagcgatcgccgtttcgtcctcatttccatcca

SEQ ID NO: 37230 - DNA, 49 bp, Emericella nidulans
gaattcactgcggccgccatgtctacatgcttcactcgagaaggggctc

SEQ ID NO: 37231 - DNA, 41 bp, Emericella nidulans
gttctcgagacgagcgatcgcgagtggcgggtcggctcaag

SEQ ID NO: 37232 - DNA, 48 bp, Emericella nidulans
gaattcactgcggccgccatgcgaagacgagaaactcaaccgcggaat

SEQ ID NO: 37233 - DNA, 45 bp, Emericella nidulans
gttctcgagacgagcgatcgccctttgctttctccgcgagctcct

SEQ ID NO: 37234 - DNA, 44 bp, Emericella nidulans
gaattcactgcggccgccatggagtgctgtactctgtgctcttt

SEQ ID NO: 37235 - DNA, 43 bp, Emericella nidulans
gttctcgagacgagcgatcgcgtccacaagtgatgagacacct

SEQ ID NO: 37236 - DNA, 41 bp, Emericella nidulans
gaattcactgcggccgccatgtttggaggtactggcggtaa

SEQ ID NO: 37237 - DNA, 42 bp, Emericella nidulans
gttctcgagacgagcgatcgcgggcactggaatcgagatatt

SEQ ID NO: 37238 - DNA, 47 bp, Emericella nidulans
gaattcactgcggccgccatggatagtgggtggtgcattgacgcagt

SEQ ID NO: 37239 - DNA, 46 bp, Emericella nidulans
gttctcgagacgagcgatcgctctgagatccttggaaaccgatacc

SEQ ID NO: 37240 - DNA, 45 bp, Emericella nidulans
gaattcactgcggccgccatggttaacggaggagcagcgcgagga

SEQ ID NO: 37241 - DNA, 47 bp, Emericella nidulans
gttctcgagacgagcgatcgctcactgccaacagatactcacaaagg

SEQ ID NO: 37242 - DNA, 43 bp, Emericella nidulans
gaattcactgcggccgccatgctgtacaatgccggccatcagc

SEQ ID NO: 37243 - DNA, 44 bp, Emericella nidulans
gttctcgagacgagcgatcgctccgtacagttgcgcatcaagtc

SEQ ID NO: 37244 - DNA, 49 bp, Emericella nidulans
gaattcactgcggccgccatgatcgcttgtactcgaaaacacggcatta

SEQ ID NO: 37245 - DNA, 49 bp, Emericella nidulans
gttctcgagacgagcgatcgctcctgttgcactagtgataattgtctgc

SEQ ID NO: 37246 - DNA, 41 bp, Emericella nidulans
gaattcactgcggccgccatgcatcgtcgccacagccattg

SEQ ID NO: 37247 - DNA, 41 bp, Emericella nidulans
gttctcgagacgagcgatcgctccgctggcgatctgagtgc

SEQ ID NO: 37248 - DNA, 41 bp, Emericella nidulans
gaattcactgcggccgccatgtacaagcagaacgaggtccc

SEQ ID NO: 37249 - DNA, 41 bp, Emericella nidulans
gttctcgagacgagcgatcgccgcatgaggaatacgttgag

SEQ ID NO: 37250 - DNA, 41 bp, Emericella nidulans
gaattcactgcggccgccatgcgcatgttcgctcccaccaa

SEQ ID NO: 37251 - DNA, 41 bp, Emericella nidulans
gttctcgagacgagcgatcgctgaagcgaccgaggtgacca

SEQ ID NO: 37252 - DNA, 44 bp, Emericella nidulans
gaattcactgcggccgccatgtcctcaaggaagctcgtttgacc

SEQ ID NO: 37253 - DNA, 43 bp, Emericella nidulans
gttctcgagacgagcgatcgcgtggcaagtgtggcctcaagga

SEQ ID NO: 37254 - DNA, 49 bp, Emericella nidulans
gaattcactgcggccgccatgaagtctgagacgcttgctctctggggat

SEQ ID NO: 37255 - DNA, 49 bp, Emericella nidulans
gttctcgagacgagcgatcgctagggtcttcacgtaaaagcaaagctaa

SEQ ID NO: 37256 - DNA, 41 bp, Emericella nidulans
gaattcactgcggccgccatgatcacgcctgagaaggtcag

SEQ ID NO: 37257 - DNA, 39 bp, Emericella nidulans
gttctcgagacgagcgatcgcgagttccggatggtggtg

SEQ ID NO: 37258 - DNA, 41 bp, Emericella nidulans
gaattcactgcggccgccatgatcccttctggtctgatcgt

SEQ ID NO: 37259 - DNA, 46 bp, Emericella nidulans
gttctcgagacgagcgatcgcgtaaatataccggaatccagtctcc

SEQ ID NO: 37260 - DNA, 41 bp, Emericella nidulans
gaattcactgcggccgccatgaatcctcgcatccatgtctc

SEQ ID NO: 37261 - DNA, 49 bp, Emericella nidulans
gttctcgagacgagcgatcgcgcttcctgtaacatatgttttcgaattg

SEQ ID NO: 37262 - DNA, 46 bp, Emericella nidulans
gaattcactgcggccgccatgaggtcgaagcatttcagttgttgaa

SEQ ID NO: 37263 - DNA, 41 bp, Emericella nidulans
gttctcgagacgagcgatcgccagcaccgttttcgcagctc

SEQ ID NO: 37264 - DNA, 41 bp, Emericella nidulans
gaattcactgcggccgccatgtgctctcaagcagcttccta

SEQ ID NO: 37265 - DNA, 41 bp, Emericella nidulans
gttctcgagacgagcgatcgccggataatgttgtccacacg

SEQ ID NO: 37266 - DNA, 42 bp, Emericella nidulans
gaattcactgcggccgccatggcagcagctggggaagccaat

SEQ ID NO: 37267 - DNA, 48 bp, Emericella nidulans
gttctcgagacgagcgatcgcaagagtttaatagtccggtcgttgcat

SEQ ID NO: 37268 - DNA, 49 bp, Emericella nidulans
gaattcactgcggccgccatgcgacggaagtaagagactattataaaca

SEQ ID NO: 37269 - DNA, 42 bp, Emericella nidulans
gttctcgagacgagcgatcgccatatgacgatcaatccaccc

SEQ ID NO: 37270 - DNA, 41 bp, Emericella nidulans
gaattcactgcggccgccatgcacttccacagcactgcaac

SEQ ID NO: 37271 - DNA, 39 bp, Emericella nidulans
gttctcgagacgagcgatcgcggttaggatcgcgaggac

SEQ ID NO: 37272 - DNA, 41 bp, Emericella nidulans
gaattcactgcggccgccatgtcgctctcactctccaaact

SEQ ID NO: 37273 - DNA, 43 bp, Emericella nidulans
gttctcgagacgagcgatcgctaatgtagcagtcgggaaatag

SEQ ID NO: 37274 - DNA, 40 bp, Emericella nidulans
gaattcactgcggccgccatgcagcgcgtgcatacaaaat

SEQ ID NO: 37275 - DNA, 46 bp, Emericella nidulans
gttctcgagacgagcgatcgccttttaaagataatgcatgtaggga

SEQ ID NO: 37276 - DNA, 42 bp, Emericella nidulans
gaattcactgcggccgccatgtttgagtcgtcaaaaagaccc

SEQ ID NO: 37277 - DNA, 40 bp, Emericella nidulans
gttctcgagacgagcgatcgccgaatgcatcgctttcagt

SEQ ID NO: 37278 - DNA, 48 bp, Emericella nidulans
gaattcactgcggccgccatgtccggcttcatcgtgtttaaacttcac

SEQ ID NO: 37279 - DNA, 49 bp, Emericella nidulans
gttctcgagacgagcgatcgcagagttagagaaacctcttgagcctgga

SEQ ID NO: 37280 - DNA, 45 bp, Emericella nidulans
gaattcactgcggccgccatgttcgacgacaagtcccaacactgc

SEQ ID NO: 37281 - DNA, 45 bp, Emericella nidulans
gttctcgagacgagcgatcgccattcacagtctcccactgttcca

SEQ ID NO: 37282 - DNA, 42 bp, Emericella nidulans
gaattcactgcggccgccatggccgttgtttgtgggggtttg

SEQ ID NO: 37283 - DNA, 41 bp, Emericella nidulans
gttctcgagacgagcgatcgcggcttcttgccagccgcatt

SEQ ID NO: 37284 - DNA, 41 bp, Emericella nidulans
gaattcactgcggccgccatggcgctacctggctgcggaaa

SEQ ID NO: 37285 - DNA, 41 bp, Emericella nidulans
gttctcgagacgagcgatcgccgcgctcatgcgtcagaggt

SEQ ID NO: 37286 - DNA, 41 bp, Emericella nidulans
gaattcactgcggccgccatggcgcctccgacacccaactc

SEQ ID NO: 37287 - DNA, 44 bp, Emericella nidulans
gttctcgagacgagcgatcgcagacgagtaccatgacgcaccca

SEQ ID NO: 37288 - DNA, 46 bp, Emericella nidulans
gaattcactgcggccgccatgagggcattgtcaagggtgatcatgt

SEQ ID NO: 37289 - DNA, 46 bp, Emericella nidulans
gttctcgagacgagcgatcgcggcaaccttgattcagaccttgctg

SEQ ID NO: 37290 - DNA, 49 bp, Emericella nidulans
gaattcactgcggccgccatgagcttcacttctgactgctatggcgaga

SEQ ID NO: 37291 - DNA, 44 bp, Emericella nidulans
gttctcgagacgagcgatcgcgccgtctcagcaagcttcgatct

SEQ ID NO: 37292 - DNA, 46 bp, Emericella nidulans
gaattcactgcggccgccatgcagctgtgtaaatggtgccctgtca

SEQ ID NO: 37293 - DNA, 48 bp, Emericella nidulans
gttctcgagacgagcgatcgcggttttcagactgaaacttgtcgttca

SEQ ID NO: 37294 - DNA, 41 bp, Emericella nidulans
gaattcactgcggccgccatggcagcattctagcaagggac

SEQ ID NO: 37295 - DNA, 41 bp, Emericella nidulans
gttctcgagacgagcgatcgcaaactgcttgcccaataacg

SEQ ID NO: 37296 - DNA, 41 bp, Emericella nidulans
gaattcactgcggccgccatgaagcccaagccgctcgtgaa

SEQ ID NO: 37297 - DNA, 49 bp, Emericella nidulans
gttctcgagacgagcgatcgcctaaagcttgacactcttgaccaggttc

SEQ ID NO: 37298 - DNA, 45 bp, Emericella nidulans
gaattcactgcggccgccatggccgggtggagttatctgggcaag

SEQ ID NO: 37299 - DNA, 49 bp, Emericella nidulans
gttctcgagacgagcgatcgcaaaatcaaagtagggcttgtcaaagtgg

SEQ ID NO: 37300 - DNA, 41 bp, Emericella nidulans
gaattcactgcggccgccatgccatggccggacaaatggtg

SEQ ID NO: 37301 - DNA, 45 bp, Emericella nidulans
gttctcgagacgagcgatcgctgttagttaagccttgcccatccc

SEQ ID NO: 37302 - DNA, 42 bp, Emericella nidulans
gaattcactgcggccgccatgccgtcatgggcgatacagtcc

SEQ ID NO: 37303 - DNA, 48 bp, Emericella nidulans
gttctcgagacgagcgatcgcccagaatgtacttggcttcaaccattg

SEQ ID NO: 37304 - DNA, 43 bp, Emericella nidulans
gaattcactgcggccgccatgaggctcttactccgggggaggc

SEQ ID NO: 37305 - DNA, 45 bp, Emericella nidulans
gttctcgagacgagcgatcgcgaactccgcatccgtaagccctga

SEQ ID NO: 37306 - DNA, 40 bp, Emericella nidulans
gaattcactgcggccgccatgggcctcagtcaacctggtc

SEQ ID NO: 37307 - DNA, 39 bp, Emericella nidulans
gttctcgagacgagcgatcgcccagccctcaacatcagg

SEQ ID NO: 37308 - DNA, 46 bp, Emericella nidulans
gaattcactgcggccgccatggtccctggcagttagaggattgaaa

SEQ ID NO: 37309 - DNA, 49 bp, Emericella nidulans
gttctcgagacgagcgatcgctgagtaggacagctggtcctcttatagc

SEQ ID NO: 37310 - DNA, 42 bp, Emericella nidulans
gaattcactgcggccgccatgcccgctttgtgttgggcaatg

SEQ ID NO: 37311 - DNA, 49 bp, Emericella nidulans
gttctcgagacgagcgatcgccggtaaatggaagtcctcacaagaatgg

SEQ ID NO: 37312 - DNA, 44 bp, Emericella nidulans
gaattcactgcggccgccatgggagttgtgttcagcaatagtca

SEQ ID NO: 37313 - DNA, 41 bp, Emericella nidulans
gttctcgagacgagcgatcgctcaaggacatccagagtcag

SEQ ID NO: 37314 - DNA, 41 bp, Emericella nidulans
gaattcactgcggccgccatgggaaaacgtccaggacaaga

SEQ ID NO: 37315 - DNA, 44 bp, Emericella nidulans
gttctcgagacgagcgatcgccatcactgtgtagactctgttgc

SEQ ID NO: 37316 - DNA, 49 bp, Emericella nidulans
gaattcactgcggccgccatggcagttgtaccctcggaagatagtcacc

SEQ ID NO: 37317 - DNA, 49 bp, Emericella nidulans
gttctcgagacgagcgatcgcagactgattgttcaatagcagaggcaca

SEQ ID NO: 37318 - DNA, 46 bp, Emericella nidulans
gaattcactgcggccgccatggccattgacaccgagagtgaaaagg

SEQ ID NO: 37319 - DNA, 49 bp, Emericella nidulans
gttctcgagacgagcgatcgcgatagtcccggaataacccttggtacgc

SEQ ID NO: 37320 - DNA, 41 bp, Emericella nidulans
gaattcactgcggccgccatgcatctggcgatcgtagcttt

SEQ ID NO: 37321 - DNA, 41 bp, Emericella nidulans
gttctcgagacgagcgatcgcctgggagagagtccaaggtg

SEQ ID NO: 37322 - DNA, 44 bp, Emericella nidulans
gaattcactgcggccgccatgcccctggaaacgagctatgtgga

SEQ ID NO: 37323 - DNA, 42 bp, Emericella nidulans
gttctcgagacgagcgatcgcgccaagtatgccgccttccat

SEQ ID NO: 37324 - DNA, 48 bp, Emericella nidulans
gaattcactgcggccgccatgtcgttacttcacctacctcggttacga

SEQ ID NO: 37325 - DNA, 44 bp, Emericella nidulans
gttctcgagacgagcgatcgccttctgccttcagagcgggaaca

SEQ ID NO: 37326 - DNA, 44 bp, Emericella nidulans
gaattcactgcggccgccatgagctttatctcagtcacaacaaa

SEQ ID NO: 37327 - DNA, 41 bp, Emericella nidulans
gttctcgagacgagcgatcgccacatccatcaacacccttg

SEQ ID NO: 37328 - DNA, 45 bp, Emericella nidulans
gaattcactgcggccgccatgtggttcacgtacccaccaaagtcg

SEQ ID NO: 37329 - DNA, 41 bp, Emericella nidulans
gttctcgagacgagcgatcgcacaccgcggcggagagagag

SEQ ID NO: 37330 - DNA, 41 bp, Emericella nidulans
gaattcactgcggccgccatgtctccgcactgccctcacca

SEQ ID NO: 37331 - DNA, 40 bp, Emericella nidulans
gttctcgagacgagcgatcgcgcgggtccggcttgtcgag

SEQ ID NO: 37332 - DNA, 43 bp, Emericella nidulans
gaattcactgcggccgccatgtcccacgcaacgaaacgtgcaa

SEQ ID NO: 37333 - DNA, 49 bp, Emericella nidulans
gttctcgagacgagcgatcgctagttagaactggatcacacaggccatt

SEQ ID NO: 37334 - DNA, 41 bp, Emericella nidulans
gaattcactgcggccgccatgtcatacggccggccaagctc

SEQ ID NO: 37335 - DNA, 41 bp, Emericella nidulans
gttctcgagacgagcgatcgcgtggtggaggcggtggtggt

SEQ ID NO: 37336 - DNA, 44 bp, Emericella nidulans
gaattcactgcggccgccatgcctcccgaagagaactccacctc

SEQ ID NO: 37337 - DNA, 43 bp, Emericella nidulans
gttctcgagacgagcgatcgctgattcctgctgctgccgtgac

SEQ ID NO: 37338 - DNA, 49 bp, Emericella nidulans
gaattcactgcggccgccatgatgagggctcgagtaatactggctttcg

SEQ ID NO: 37339 - DNA, 45 bp, Emericella nidulans
gttctcgagacgagcgatcgccgtcgtagtgctggattgcctgct

SEQ ID NO: 37340 - DNA, 49 bp, Emericella nidulans
gaattcactgcggccgccatgcaatggatgacctctatgacgagtatgc

SEQ ID NO: 37341 - DNA, 42 bp, Emericella nidulans
gttctcgagacgagcgatcgcgcatgtccatgaacgcggttt

SEQ ID NO: 37342 - DNA, 41 bp, Emericella nidulans
gaattcactgcggccgccatgagcgcggcgctctttgtctc

SEQ ID NO: 37343 - DNA, 49 bp, Emericella nidulans
gttctcgagacgagcgatcgcaacgtccctagttctatctcgtcgtctc

SEQ ID NO: 37344 - DNA, 49 bp, Emericella nidulans
gaattcactgcggccgccatgctgaacgtactcggaaacattccgaccc

SEQ ID NO: 37345 - DNA, 45 bp, Emericella nidulans
gttctcgagacgagcgatcgcccccttccatccgatcggtatcat

SEQ ID NO: 37346 - DNA, 42 bp, Emericella nidulans
gaattcactgcggccgccatgccgttcagaagcctatctagc

SEQ ID NO: 37347 - DNA, 41 bp, Emericella nidulans
gttctcgagacgagcgatcgccgcaatgcactcaatctcaa

SEQ ID NO: 37348 - DNA, 42 bp, Emericella nidulans
gaattcactgcggccgccatgagccagtcagcatagcttgag

SEQ ID NO: 37349 - DNA, 44 bp, Emericella nidulans
gttctcgagacgagcgatcgcccggaagaaattctctacctctt

SEQ ID NO: 37350 - DNA, 47 bp, Emericella nidulans
gaattcactgcggccgccatgccaatgctgatgcttcatgatgattt

SEQ ID NO: 37351 - DNA, 41 bp, Emericella nidulans
gttctcgagacgagcgatcgctgcttggagcttcacgccac

SEQ ID NO: 37352 - DNA, 41 bp, Emericella nidulans
gaattcactgcggccgccatgcccctgcaaactttttgatg

SEQ ID NO: 37353 - DNA, 45 bp, Emericella nidulans
gttctcgagacgagcgatcgcccagagtaacagcaagtgttttga

SEQ ID NO: 37354 - DNA, 40 bp, Emericella nidulans
gaattcactgcggccgccatgagggggatcagtcggattt

SEQ ID NO: 37355 - DNA, 45 bp, Emericella nidulans
gttctcgagacgagcgatcgcttaactgataaagcaaagacaacc

SEQ ID NO: 37356 - DNA, 42 bp, Emericella nidulans
gaattcactgcggccgccatgtgtgccgaacactcgcacgac

SEQ ID NO: 37357 - DNA, 40 bp, Emericella nidulans
gttctcgagacgagcgatcgccgcctgccgaaacgctgag

SEQ ID NO: 37358 - DNA, 41 bp, Emericella nidulans
gaattcactgcggccgccatgccctggcaccgcctgatgat

SEQ ID NO: 37359 - DNA, 45 bp, Emericella nidulans
gttctcgagacgagcgatcgcgctcaacaacacgcgaatctctcc

SEQ ID NO: 37360 - DNA, 41 bp, Emericella nidulans
gaattcactgcggccgccatgtccgcgaaacagcggttcaa

SEQ ID NO: 37361 - DNA, 49 bp, Emericella nidulans
gttctcgagacgagcgatcgcttcatatatacgcatgaacttggcaaca

SEQ ID NO: 37362 - DNA, 41 bp, Emericella nidulans
gaattcactgcggccgccatgaaaaactccacgggcgagca

SEQ ID NO: 37363 - DNA, 49 bp, Emericella nidulans
gttctcgagacgagcgatcgctgtcccattcgcaaagataacagtgtcc

SEQ ID NO: 37364 - DNA, 41 bp, Emericella nidulans
gaattcactgcggccgccatgatatatggggagacggggag

SEQ ID NO: 37365 - DNA, 45 bp, Emericella nidulans
gttctcgagacgagcgatcgcattgagttcgttccattctagtga

SEQ ID NO: 37366 - DNA, 41 bp, Emericella nidulans
gaattcactgcggccgccatgccgtatcatgctccttgtca

SEQ ID NO: 37367 - DNA, 41 bp, Emericella nidulans
gttctcgagacgagcgatcgcgtccttgagagcagagaggc

SEQ ID NO: 37368 - DNA, 47 bp, Emericella nidulans
gaattcactgcggccgccatgttacacaaatgcgcttccatacagca

SEQ ID NO: 37369 - DNA, 49 bp, Emericella nidulans
gttctcgagacgagcgatcgcgccttaacccttacgagatcccccgtag

SEQ ID NO: 37370 - DNA, 41 bp, Emericella nidulans
gaattcactgcggccgccatgttcgcaggcgacacctcgtg

SEQ ID NO: 37371 - DNA, 47 bp, Emericella nidulans
gttctcgagacgagcgatcgccttcaaagttggtgggtatgccttga

SEQ ID NO: 37372 - DNA, 41 bp, Emericella nidulans
gaattcactgcggccgccatgcatcaggctcgtctgtttcc

SEQ ID NO: 37373 - DNA, 41 bp, Emericella nidulans
gttctcgagacgagcgatcgcccaaagacagcccttttgtt

SEQ ID NO: 37374 - DNA, 42 bp, Emericella nidulans
gaattcactgcggccgccatgtgcggtgttgaagctggaggg

SEQ ID NO: 37375 - DNA, 44 bp, Emericella nidulans
gttctcgagacgagcgatcgcagccagcttggttagggcagctt

SEQ ID NO: 37376 - DNA, 43 bp, Emericella nidulans
gaattcactgcggccgccatgtgcagatttggagacgacgcta

SEQ ID NO: 37377 - DNA, 46 bp, Emericella nidulans
gttctcgagacgagcgatcgcgaatcatatgagcaccagcaacggt

SEQ ID NO: 37378 - DNA, 44 bp, Emericella nidulans
gaattcactgcggccgccatggatagaactggggtgtaagagga

SEQ ID NO: 37379 - DNA, 44 bp, Emericella nidulans
gttctcgagacgagcgatcgcagctccgtctatacagaaaatca

SEQ ID NO: 37380 - DNA, 41 bp, Emericella nidulans
gaattcactgcggccgccatgccgcctgctgcgtctcttcc

SEQ ID NO: 37381 - DNA, 43 bp, Emericella nidulans
gttctcgagacgagcgatcgctgctcttgcactccttcgcaca

SEQ ID NO: 37382 - DNA, 49 bp, Emericella nidulans
gaattcactgcggccgccatgcagcgtaccattgagaagttcgagaagg

SEQ ID NO: 37383 - DNA, 45 bp, Emericella nidulans
gttctcgagacgagcgatcgcataccgggggtgataacaccagtc

SEQ ID NO: 37384 - DNA, 48 bp, Emericella nidulans
gaattcactgcggccgccatggaatctgctatgctgatcaagcccttc

SEQ ID NO: 37385 - DNA, 42 bp, Emericella nidulans
gttctcgagacgagcgatcgccccgtaagcatggcgctcaca

SEQ ID NO: 37386 - DNA, 42 bp, Emericella nidulans
gaattcactgcggccgccatgtggcatcaacagccccaatcg

SEQ ID NO: 37387 - DNA, 43 bp, Emericella nidulans
gttctcgagacgagcgatcgctgcttccgcgtgatacagaagg

SEQ ID NO: 37388 - DNA, 41 bp, Emericella nidulans
gaattcactgcggccgccatgaacatcactggggtctacgc

SEQ ID NO: 37389 - DNA, 43 bp, Emericella nidulans
gttctcgagacgagcgatcgcgaaccttcatggtatcgccaac

SEQ ID NO: 37390 - DNA, 48 bp, Emericella nidulans
gaattcactgcggccgccatggattttcctgcgagaaatcatctccaa

SEQ ID NO: 37391 - DNA, 44 bp, Emericella nidulans
gttctcgagacgagcgatcgcttggactccttgctagccttggt

SEQ ID NO: 37392 - DNA, 45 bp, Emericella nidulans
gaattcactgcggccgccatgaacctccagcaaacgtgggcctct

SEQ ID NO: 37393 - DNA, 42 bp, Emericella nidulans
gttctcgagacgagcgatcgcgcactgatttggcccaacctt

SEQ ID NO: 37394 - DNA, 46 bp, Emericella nidulans
gaattcactgcggccgccatgttgacttccaccccctgtctatctg

SEQ ID NO: 37395 - DNA, 45 bp, Emericella nidulans
gttctcgagacgagcgatcgcttgcttcttgagttcctgctgacg

SEQ ID NO: 37396 - DNA, 49 bp, Emericella nidulans
gaattcactgcggccgccatgcagttctgcaacgttatccctgcccatt

SEQ ID NO: 37397 - DNA, 41 bp, Emericella nidulans
gttctcgagacgagcgatcgcgccctggggctttgctgttg

SEQ ID NO: 37398 - DNA, 41 bp, Emericella nidulans
gaattcactgcggccgccatgaagtcgccggacacccctcc

SEQ ID NO: 37399 - DNA, 42 bp, Emericella nidulans
gttctcgagacgagcgatcgccgatcaccttctggccaggct

SEQ ID NO: 37400 - DNA, 44 bp, Emericella nidulans
gaattcactgcggccgccatgtcgcgaaaaccaaaaacgaggtc

SEQ ID NO: 37401 - DNA, 49 bp, Emericella nidulans
gttctcgagacgagcgatcgctttttgactttgttttcgacgccttctg

SEQ ID NO: 37402 - DNA, 40 bp, Emericella nidulans
gaattcactgcggccgccatggtatcgccgaggacagctc

SEQ ID NO: 37403 - DNA, 41 bp, Emericella nidulans
gttctcgagacgagcgatcgctccctcctttagcctcaaca

SEQ ID NO: 37404 - DNA, 43 bp, Emericella nidulans
gaattcactgcggccgccatgccctgtccatcaccgccagcta

SEQ ID NO: 37405 - DNA, 41 bp, Emericella nidulans
gttctcgagacgagcgatcgcgccaccgccagagtggttga

SEQ ID NO: 37406 - DNA, 44 bp, Emericella nidulans
gaattcactgcggccgccatggctttcttcttcattgcgggttc

SEQ ID NO: 37407 - DNA, 49 bp, Emericella nidulans
gttctcgagacgagcgatcgcaatagacccattgatgatgcgcgccgta

SEQ ID NO: 37408 - DNA, 49 bp, Emericella nidulans
gaattcactgcggccgccatgtgacgatcatcctgtatatcttcgctga

SEQ ID NO: 37409 - DNA, 46 bp, Emericella nidulans
gttctcgagacgagcgatcgcataccgaagaggtctgcgtcgtctg

SEQ ID NO: 37410 - DNA, 45 bp, Emericella nidulans
gaattcactgcggccgccatgctttacgacaacagtactcaggaa

SEQ ID NO: 37411 - DNA, 41 bp, Emericella nidulans
gttctcgagacgagcgatcgccatgtcctcaagcaccttca

SEQ ID NO: 37412 - DNA, 44 bp, Emericella nidulans
gaattcactgcggccgccatggtctctatcggtgacgaattgat

SEQ ID NO: 37413 - DNA, 39 bp, Emericella nidulans
gttctcgagacgagcgatcgcgccgtagcaaccaacctc

SEQ ID NO: 37414 - DNA, 42 bp, Emericella nidulans
gaattcactgcggccgccatggaaactcgcggactaaatgtg

SEQ ID NO: 37415 - DNA, 41 bp, Emericella nidulans
gttctcgagacgagcgatcgccaagtctaccgcgtcatcaa

SEQ ID NO: 37416 - DNA, 41 bp, Emericella nidulans
gaattcactgcggccgccatgctcattgccactgttctcca

SEQ ID NO: 37417 - DNA, 42 bp, Emericella nidulans
gttctcgagacgagcgatcgctcagcaatcatcagatcgtca

SEQ ID NO: 37418 - DNA, 41 bp, Emericella nidulans
gaattcactgcggccgccatggcgcctttgcaaccacctcc

SEQ ID NO: 37419 - DNA, 49 bp, Emericella nidulans
gttctcgagacgagcgatcgctctcaaactgctcttcaaagctaagtcc

SEQ ID NO: 37420 - DNA, 43 bp, Emericella nidulans
gaattcactgcggccgccatgttccagcgaaaaaccggttacg

SEQ ID NO: 37421 - DNA, 49 bp, Emericella nidulans
gttctcgagacgagcgatcgcataacctcaagcatccattccgcagggt

SEQ ID NO: 37422 - DNA, 39 bp, Emericella nidulans
gaattcactgcggccgccatgctcgctgcggtgacctac

SEQ ID NO: 37423 - DNA, 49 bp, Emericella nidulans
gttctcgagacgagcgatcgcgtttcctatatatatacggttggctggt

SEQ ID NO: 37424 - DNA, 41 bp, Emericella nidulans
gaattcactgcggccgccatggcatacagccgggcagtgga

SEQ ID NO: 37425 - DNA, 49 bp, Emericella nidulans
gttctcgagacgagcgatcgcaatgctttatttctttgtcatgcagctc

SEQ ID NO: 37426 - DNA, 41 bp, Emericella nidulans
gaattcactgcggccgccatggcacggcgacaaccctgtca

SEQ ID NO: 37427 - DNA, 40 bp, Emericella nidulans
gttctcgagacgagcgatcgcgcaacggcgggcttgttcc

SEQ ID NO: 37428 - DNA, 41 bp, Emericella nidulans
gaattcactgcggccgccatgcgtcggcgcccattaaccct

SEQ ID NO: 37429 - DNA, 41 bp, Emericella nidulans
gttctcgagacgagcgatcgcgttccatgcggtgccggagt

SEQ ID NO: 37430 - DNA, 41 bp, Emericella nidulans
gaattcactgcggccgccatgtggcggacgcccaatttgat

SEQ ID NO: 37431 - DNA, 41 bp, Emericella nidulans
gttctcgagacgagcgatcgctgctttccgcctggggacac

SEQ ID NO: 37432 - DNA, 46 bp, Emericella nidulans
gaattcactgcggccgccatgagctaaactacatgattttgcgact

SEQ ID NO: 37433 - DNA, 41 bp, Emericella nidulans
gttctcgagacgagcgatcgccttgcaaagataacgggtcc

SEQ ID NO: 37434 - DNA, 40 bp, Emericella nidulans
gaattcactgcggccgccatgtgtatttgccctccccaag

SEQ ID NO: 37435 - DNA, 41 bp, Emericella nidulans
gttctcgagacgagcgatcgcccagcgtcttcttcatagcc

SEQ ID NO: 37436 - DNA, 45 bp, Emericella nidulans
gaattcactgcggccgccatgcactgaggtttcttgcctgggaca

SEQ ID NO: 37437 - DNA, 41 bp, Emericella nidulans
gttctcgagacgagcgatcgcgctgcacgacttgcggctca

SEQ ID NO: 37438 - DNA, 41 bp, Emericella nidulans
gaattcactgcggccgccatgaccgaggtcctttctcgtct

SEQ ID NO: 37439 - DNA, 41 bp, Emericella nidulans
gttctcgagacgagcgatcgctcctcatcccagttagggtt

SEQ ID NO: 37440 - DNA, 41 bp, Emericella nidulans
gaattcactgcggccgccatgcgagaactggggcccgcata

SEQ ID NO: 37441 - DNA, 45 bp, Emericella nidulans
gttctcgagacgagcgatcgccactacagcacgctcatacgcttc

SEQ ID NO: 37442 - DNA, 43 bp, Emericella nidulans
gaattcactgcggccgccatgatcccgggtatcaccacaccca

SEQ ID NO: 37443 - DNA, 45 bp, Emericella nidulans
gttctcgagacgagcgatcgccttgatatcgatgcgctttccagt

SEQ ID NO: 37444 - DNA, 49 bp, Emericella nidulans
gaattcactgcggccgccatgaacctccacctaatacagggctcgctca

SEQ ID NO: 37445 - DNA, 41 bp, Emericella nidulans
gttctcgagacgagcgatcgcgcctcgcggagcttctgctg

SEQ ID NO: 37446 - DNA, 44 bp, Emericella nidulans
gaattcactgcggccgccatggtcccaatgtacggtcgcgcaaa

SEQ ID NO: 37447 - DNA, 41 bp, Emericella nidulans
gttctcgagacgagcgatcgccacgccgaggagccagggta

SEQ ID NO: 37448 - DNA, 41 bp, Emericella nidulans
gaattcactgcggccgccatgctgggcactggcggctcaac

SEQ ID NO: 37449 - DNA, 45 bp, Emericella nidulans
gttctcgagacgagcgatcgcggaggtcaaattcagaggcgagca

SEQ ID NO: 37450 - DNA, 41 bp, Emericella nidulans
gaattcactgcggccgccatgccggcatccccctggcttac

SEQ ID NO: 37451 - DNA, 46 bp, Emericella nidulans
gttctcgagacgagcgatcgcaagctcgtcatgctcaggcttttca

SEQ ID NO: 37452 - DNA, 41 bp, Emericella nidulans
gaattcactgcggccgccatgcccctcccatgaccgcgaat

SEQ ID NO: 37453 - DNA, 47 bp, Emericella nidulans
gttctcgagacgagcgatcgccggatcaacactaaaagtccccttca

SEQ ID NO: 37454 - DNA, 41 bp, Emericella nidulans
gaattcactgcggccgccatgcagagcgcagcacgagctaa

SEQ ID NO: 37455 - DNA, 49 bp, Emericella nidulans
gttctcgagacgagcgatcgcactttctcctcgaagttttgttcagagc

SEQ ID NO: 37456 - DNA, 39 bp, Emericella nidulans
gaattcactgcggccgccatggacgccgtggactcaact

SEQ ID NO: 37457 - DNA, 41 bp, Emericella nidulans
gttctcgagacgagcgatcgcggtgcaactcgtgctctgta

SEQ ID NO: 37458 - DNA, 45 bp, Emericella nidulans
gaattcactgcggccgccatgatgagccatattcaacgggaaacg

SEQ ID NO: 37459 - DNA, 48 bp, Emericella nidulans
gttctcgagacgagcgatcgcgaaaaactcatcgagcatcaaatgaaa

SEQ ID NO: 37460 - DNA, 41 bp, Emericella nidulans
gaattcactgcggccgccatgttgcctgggcgccatgactt

SEQ ID NO: 37461 - DNA, 48 bp, Emericella nidulans
gttctcgagacgagcgatcgcaggtcgcaattaaattccgcccctcgt

SEQ ID NO: 37462 - DNA, 44 bp, Emericella nidulans
gaattcactgcggccgccatgaccatgattatcataccgtcgag

SEQ ID NO: 37463 - DNA, 41 bp, Emericella nidulans
gttctcgagacgagcgatcgccctattgggcgagaagttcc

SEQ ID NO: 37464 - DNA, 42 bp, Emericella nidulans
gaattcactgcggccgccatgccggagacgccatgttctcca

SEQ ID NO: 37465 - DNA, 44 bp, Emericella nidulans
gttctcgagacgagcgatcgcccattcatccagcgcaatcttcg

SEQ ID NO: 37466 - DNA, 48 bp, Emericella nidulans
gaattcactgcggccgccatgagtatgacgagccggatcgcacttttc

SEQ ID NO: 37467 - DNA, 43 bp, Emericella nidulans
gttctcgagacgagcgatcgcgcatccactctccccagaacca

SEQ ID NO: 37468 - DNA, 45 bp, Emericella nidulans
gaattcactgcggccgccatgcctctctgaactccacgccctctc

SEQ ID NO: 37469 - DNA, 42 bp, Emericella nidulans
gttctcgagacgagcgatcgcgccgttgaccccatgaaacca

SEQ ID NO: 37470 - DNA, 43 bp, Emericella nidulans
gaattcactgcggccgccatggcgaagaacgagaacgcgagga

SEQ ID NO: 37471 - DNA, 44 bp, Emericella nidulans
gttctcgagacgagcgatcgccatgtagtcctttcggtgctgga

SEQ ID NO: 37472 - DNA, 49 bp, Emericella nidulans
gaattcactgcggccgccatgaagggactttaatctcaagcagaactcc

SEQ ID NO: 37473 - DNA, 49 bp, Emericella nidulans
gttctcgagacgagcgatcgcattctccttgcatgtacgatcaaattca

SEQ ID NO: 37474 - DNA, 41 bp, Emericella nidulans
gaattcactgcggccgccatgggccgcggccagtaagatcc

SEQ ID NO: 37475 - DNA, 49 bp, Emericella nidulans
gttctcgagacgagcgatcgcttcctaagcagctcagtcaaacaacaca

SEQ ID NO: 37476 - DNA, 44 bp, Emericella nidulans
gaattcactgcggccgccatgaactcgcatccgaaaggctgtct

SEQ ID NO: 37477 - DNA, 48 bp, Emericella nidulans
gttctcgagacgagcgatcgctagtcgtaacggggtctaacatctcct

SEQ ID NO: 37478 - DNA, 41 bp, Emericella nidulans
gaattcactgcggccgccatgaggacatcacatgggaggag

SEQ ID NO: 37479 - DNA, 42 bp, Emericella nidulans
gttctcgagacgagcgatcgctccaaatatgccgtttctacc

SEQ ID NO: 37480 - DNA, 47 bp, Emericella nidulans
gaattcactgcggccgccatgtcgttggtttgctggtattcagtttc

SEQ ID NO: 37481 - DNA, 43 bp, Emericella nidulans
gttctcgagacgagcgatcgccaagatccccattcggccttgg

SEQ ID NO: 37482 - DNA, 49 bp, Emericella nidulans
gaattcactgcggccgccatgtgatgctgaatctggttactgactgcaa

SEQ ID NO: 37483 - DNA, 45 bp, Emericella nidulans
gttctcgagacgagcgatcgcgcccttggtgtcgtagatgagacg

SEQ ID NO: 37484 - DNA, 42 bp, Emericella nidulans
gaattcactgcggccgccatgggggtcgacttcgtggtcgtg

SEQ ID NO: 37485 - DNA, 41 bp, Emericella nidulans
gttctcgagacgagcgatcgcgcaacaaccgcatcgccaaa

SEQ ID NO: 37486 - DNA, 42 bp, Emericella nidulans
gaattcactgcggccgccatggccgtttcgaccgtgaagtcg

SEQ ID NO: 37487 - DNA, 49 bp, Emericella nidulans
gttctcgagacgagcgatcgctaacttaccagtcagaagctggttgacg

SEQ ID NO: 37488 - DNA, 40 bp, Emericella nidulans
gaattcactgcggccgccatgcgggcgttcgttttacttt

SEQ ID NO: 37489 - DNA, 41 bp, Emericella nidulans
gttctcgagacgagcgatcgcgctcaccggtcttgaagaga

SEQ ID NO: 37490 - DNA, 41 bp, Emericella nidulans
gaattcactgcggccgccatgtgacaaaccagtcacgcttc

SEQ ID NO: 37491 - DNA, 41 bp, Emericella nidulans
gttctcgagacgagcgatcgcttttgctcccaagattggac

SEQ ID NO: 37492 - DNA, 39 bp, Emericella nidulans
gaattcactgcggccgccatgcgcacgcgcccttattgc

SEQ ID NO: 37493 - DNA, 47 bp, Emericella nidulans
gttctcgagacgagcgatcgcgcatgacgtcctgtactgtttcactg

SEQ ID NO: 37494 - DNA, 41 bp, Emericella nidulans
gaattcactgcggccgccatgtgttgagacactggtgggtg

SEQ ID NO: 37495 - DNA, 45 bp, Emericella nidulans
gttctcgagacgagcgatcgcctctaacaagaacttcagaaaagc

SEQ ID NO: 37496 - DNA, 44 bp, Emericella nidulans
gaattcactgcggccgccatgcagtatcccggcgcagattttca

SEQ ID NO: 37497 - DNA, 49 bp, Emericella nidulans
gttctcgagacgagcgatcgcattcccctgatctgttgtaatgttgaga

SEQ ID NO: 37498 - DNA, 48 bp, Emericella nidulans
gaattcactgcggccgccatgacagtcctacttcttcaaaagcgacga

SEQ ID NO: 37499 - DNA, 49 bp, Emericella nidulans
gttctcgagacgagcgatcgcaggtcatagtcgcatagactccgccaga

SEQ ID NO: 37500 - DNA, 41 bp, Emericella nidulans
gaattcactgcggccgccatgcggaagcgacaaatatcacc

SEQ ID NO: 37501 - DNA, 39 bp, Emericella nidulans
gttctcgagacgagcgatcgccctcgggataccactgtc

SEQ ID NO: 37502 - DNA, 41 bp, Emericella nidulans
gaattcactgcggccgccatggccgacccccaagtccgtgt

SEQ ID NO: 37503 - DNA, 41 bp, Emericella nidulans
gttctcgagacgagcgatcgcaaaaccgaccagccgtcctc

SEQ ID NO: 37504 - DNA, 41 bp, Emericella nidulans
gaattcactgcggccgccatgcgcccacggctcaagaaagc

SEQ ID NO: 37505 - DNA, 43 bp, Emericella nidulans
gttctcgagacgagcgatcgccggtgagcgtccgctcatagta

SEQ ID NO: 37506 - DNA, 43 bp, Emericella nidulans
gaattcactgcggccgccatggggggaatcgtaagcctccaga

SEQ ID NO: 37507 - DNA, 47 bp, Emericella nidulans
gttctcgagacgagcgatcgcgtgccgttccctgattatatctgctg

SEQ ID NO: 37508 - DNA, 45 bp, Emericella nidulans
gaattcactgcggccgccatgtcttcctgaaacgcttttccttgc

SEQ ID NO: 37509 - DNA, 48 bp, Emericella nidulans
gttctcgagacgagcgatcgcttcgttgtctttgatggagttgtacgg

SEQ ID NO: 37510 - DNA, 49 bp, Emericella nidulans
gaattcactgcggccgccatgccttgactttgttcctaccaaggagctg

SEQ ID NO: 37511 - DNA, 47 bp, Emericella nidulans
gttctcgagacgagcgatcgcgtaaaagacacatccggggccccatt

SEQ ID NO: 37512 - DNA, 43 bp, Emericella nidulans
gaattcactgcggccgccatgactcggccaaacgacccctaca

SEQ ID NO: 37513 - DNA, 40 bp, Emericella nidulans
gttctcgagacgagcgatcgcctgcccttgccggcatcac

SEQ ID NO: 37514 - DNA, 41 bp, Emericella nidulans
gaattcactgcggccgccatgaaccccgcaatcccgctcat

SEQ ID NO: 37515 - DNA, 46 bp, Emericella nidulans
gttctcgagacgagcgatcgcttagtgcctcaacgcaatcttcttg

SEQ ID NO: 37516 - DNA, 44 bp, Emericella nidulans
gaattcactgcggccgccatgatgctcaaccacgtctcaagcac

SEQ ID NO: 37517 - DNA, 48 bp, Emericella nidulans
gttctcgagacgagcgatcgcgtcttcagcttctctaggcggtgttgg

SEQ ID NO: 37518 - DNA, 43 bp, Emericella nidulans
gaattcactgcggccgccatgccaaggaccagcgattatgagc

SEQ ID NO: 37519 - DNA, 41 bp, Emericella nidulans
gttctcgagacgagcgatcgccatgtcgcggctcgcaattt

SEQ ID NO: 37520 - DNA, 41 bp, Emericella nidulans
gaattcactgcggccgccatgccacgttggctctggtgcag

SEQ ID NO: 37521 - DNA, 47 bp, Emericella nidulans
gttctcgagacgagcgatcgcatcgggtataggcacccatttcctca

SEQ ID NO: 37522 - DNA, 43 bp, Emericella nidulans
gaattcactgcggccgccatggcgggaacactctcccttgtca

SEQ ID NO: 37523 - DNA, 44 bp, Emericella nidulans
gttctcgagacgagcgatcgcaaagagtgctcgtggaaccgagt

SEQ ID NO: 37524 - DNA, 41 bp, Emericella nidulans
gaattcactgcggccgccatgctgcctcggccgtgacatcc

SEQ ID NO: 37525 - DNA, 42 bp, Emericella nidulans
gttctcgagacgagcgatcgctgcagtcgcgcgcatcttctt

SEQ ID NO: 37526 - DNA, 49 bp, Emericella nidulans
gaattcactgcggccgccatgaaccctacatgattagatgaagggccac

SEQ ID NO: 37527 - DNA, 43 bp, Emericella nidulans
gttctcgagacgagcgatcgccaaccaacatccaaaggctgga

SEQ ID NO: 37528 - DNA, 47 bp, Emericella nidulans
gaattcactgcggccgccatgctttcctgtagcgcttcacctcgttc

SEQ ID NO: 37529 - DNA, 47 bp, Emericella nidulans
gttctcgagacgagcgatcgctagttgacttggccgacttacgctga

SEQ ID NO: 37530 - DNA, 45 bp, Emericella nidulans
gaattcactgcggccgccatgccgacaaatctggtacccccatta

SEQ ID NO: 37531 - DNA, 49 bp, Emericella nidulans
gttctcgagacgagcgatcgcagttgacatacacaaccctcctcggtcc

SEQ ID NO: 37532 - DNA, 40 bp, Emericella nidulans
gaattcactgcggccgccatggcgaactccgccgcaacct

SEQ ID NO: 37533 - DNA, 43 bp, Emericella nidulans
gttctcgagacgagcgatcgcagtgggttacagcaggggcgta

SEQ ID NO: 37534 - DNA, 48 bp, Emericella nidulans
gaattcactgcggccgccatggcaggcacctaaaaaggctaccccaaa

SEQ ID NO: 37535 - DNA, 48 bp, Emericella nidulans
gttctcgagacgagcgatcgcatactctgactgtgtaagtgcgccagt

SEQ ID NO: 37536 - DNA, 47 bp, Emericella nidulans
gaattcactgcggccgccatgctgcaggtcaaagatgaggaggctgt

SEQ ID NO: 37537 - DNA, 41 bp, Emericella nidulans
gttctcgagacgagcgatcgcgagcccgcgttggaatgctc

SEQ ID NO: 37538 - DNA, 41 bp, Emericella nidulans
gaattcactgcggccgccatgaaagctccgtgacctcaaga

SEQ ID NO: 37539 - DNA, 40 bp, Emericella nidulans
gttctcgagacgagcgatcgcacgataccagcctccttgg

SEQ ID NO: 37540 - DNA, 49 bp, Emericella nidulans
gaattcactgcggccgccatgaaagaaaagaacttcccgaactgggctc

SEQ ID NO: 37541 - DNA, 43 bp, Emericella nidulans
gttctcgagacgagcgatcgccatccgtctcgctgttggggat

SEQ ID NO: 37542 - DNA, 41 bp, Emericella nidulans
gaattcactgcggccgccatggcatgggtctgaatctgtga

SEQ ID NO: 37543 - DNA, 41 bp, Emericella nidulans
gttctcgagacgagcgatcgccttccacgagttctttcacg

SEQ ID NO: 37544 - DNA, 48 bp, Emericella nidulans
gaattcactgcggccgccatgaatcttctaaaggaagttgcagggacc

SEQ ID NO: 37545 - DNA, 45 bp, Emericella nidulans
gttctcgagacgagcgatcgccagcctgattatccgacagcgact

SEQ ID NO: 37546 - DNA, 45 bp, Emericella nidulans
gaattcactgcggccgccatggaacctggaacctgcacaacaccc

SEQ ID NO: 37547 - DNA, 44 bp, Emericella nidulans
gttctcgagacgagcgatcgcgtcgactctgcaatccgcagtcc

SEQ ID NO: 37548 - DNA, 41 bp, Emericella nidulans; identical to SEQ ID NO: 33584

SEQ ID NO: 37549 - DNA, 44 bp, Emericella nidulans
gttctcgagacgagcgatcgccacctaccctctccgctgcctgt

SEQ ID NO: 37550 - DNA, 48 bp, Emericella nidulans
gaattcactgcggccgccatgaccacaacacgttcgagacaaaagagg

SEQ ID NO: 37551 - DNA, 44 bp, Emericella nidulans
gttctcgagacgagcgatcgctggccagtgaacaggtaggctcc

SEQ ID NO: 37552 - DNA, 41 bp, Emericella nidulans
gaattcactgcggccgccatggaaacgcacattcaagctca

SEQ ID NO: 37553 - DNA, 41 bp, Emericella nidulans
gttctcgagacgagcgatcgcgaggagctcctcgatcctct

SEQ ID NO: 37554 - DNA, 49 bp, Emericella nidulans
gaattcactgcggccgccatgagtattcaacatttccgtgtcgccctta

SEQ ID NO: 37555 - DNA, 49 bp, Emericella nidulans
gttctcgagacgagcgatcgctatctcagcgatctgtctatttcgttca

SEQ ID NO: 37556 - DNA, 49 bp, Emericella nidulans
gaattcactgcggccgccatggttgttcttagttgctgtcctccgtggt

SEQ ID NO: 37557 - DNA, 46 bp, Emericella nidulans
gttctcgagacgagcgatcgccgagatgaagaatgctcaccgcaag

SEQ ID NO: 37558 - DNA, 43 bp, Emericella nidulans
gaattcactgcggccgccatggatccaaaatcccaggttaagg

SEQ ID NO: 37559 - DNA, 41 bp, Emericella nidulans
gttctcgagacgagcgatcgcgtctgaaccatcagcaacca

SEQ ID NO: 37560 - DNA, 46 bp, Emericella nidulans
gaattcactgcggccgccatgggagaaacttcggcgttcttcttgc

SEQ ID NO: 37561 - DNA, 49 bp, Emericella nidulans
gttctcgagacgagcgatcgccgctgcttttgttagttcacattctccc

SEQ ID NO: 37562 - DNA, 41 bp, Emericella nidulans
gaattcactgcggccgccatgcccgttcgccatccagatca

SEQ ID NO: 37563 - DNA, 43 bp, Emericella nidulans
gttctcgagacgagcgatcgccccagctggtcgaccaggaaaa

SEQ ID NO: 37564 - DNA, 44 bp, Emericella nidulans
gaattcactgcggccgccatgacggtgctgctccaggatctctc

SEQ ID NO: 37565 - DNA, 46 bp, Emericella nidulans
gttctcgagacgagcgatcgcccccgcataatatcacaccgattcc

SEQ ID NO: 37566 - DNA, 41 bp, Emericella nidulans
gaattcactgcggccgccatgtgcaccatgccagtctgcaa

SEQ ID NO: 37567 - DNA, 48 bp, Emericella nidulans
gttctcgagacgagcgatcgccctctccctcaaaagagatctgaaccc

SEQ ID NO: 37568 - DNA, 45 bp, Emericella nidulans
gaattcactgcggccgccatgccctcatgggataccaacggacga

SEQ ID NO: 37569 - DNA, 49 bp, Emericella nidulans
gttctcgagacgagcgatcgcgataatatctgacgcctccttggcgact

SEQ ID NO: 37570 - DNA, 41 bp, Emericella nidulans
gaattcactgcggccgccatgccaggtcagacgactgtcaa

SEQ ID NO: 37571 - DNA, 41 bp, Emericella nidulans
gttctcgagacgagcgatcgctctgggagaatcccaatagc

SEQ ID NO: 37572 - DNA, 41 bp, Emericella nidulans
gaattcactgcggccgccatgtattctgatcgcgaaggtgg

SEQ ID NO: 37573 - DNA, 48 bp, Emericella nidulans
gttctcgagacgagcgatcgcccatgtaataagaagtaccgataaacg

SEQ ID NO: 37574 - DNA, 48 bp, Emericella nidulans
gaattcactgcggccgccatgcttccaacactaacaaccaactcaacc

SEQ ID NO: 37575 - DNA, 49 bp, Emericella nidulans
gttctcgagacgagcgatcgcttcatgaacccttcctggatactagcct

SEQ ID NO: 37576 - DNA, 41 bp, Emericella nidulans
gaattcactgcggccgccatgccaggtcctttctgctgttc

SEQ ID NO: 37577 - DNA, 43 bp, Emericella nidulans
gttctcgagacgagcgatcgcgatccgttaataacatcaccca

SEQ ID NO: 37578 - DNA, 45 bp, Emericella nidulans
gaattcactgcggccgccatgcgacatgaacggggatacagaggc

SEQ ID NO: 37579 - DNA, 49 bp, Emericella nidulans
gttctcgagacgagcgatcgcaacctgactacttctacccccagcgttt

SEQ ID NO: 37580 - DNA, 49 bp, Emericella nidulans
gaattcactgcggccgccatgtatcacctgcaaccttatatacgccaat

SEQ ID NO: 37581 - DNA, 47 bp, Emericella nidulans
gttctcgagacgagcgatcgcgcgggtggcgatcttataatgggctc

SEQ ID NO: 37582 - DNA, 49 bp, Emericella nidulans
gaattcactgcggccgccatgtgacaaccacaagattcctatctcaacc

SEQ ID NO: 37583 - DNA, 46 bp, Emericella nidulans
gttctcgagacgagcgatcgcttctattccatcgtggtttgtggac

SEQ ID NO: 37584 - DNA, 44 bp, Emericella nidulans
gaattcactgcggccgccatgagcaaggtatgtcgcagctgttg

SEQ ID NO: 37585 - DNA, 40 bp, Emericella nidulans
gttctcgagacgagcgatcgcaaacgtgtcggggcggtgc

SEQ ID NO: 37586 - DNA, 41 bp, Emericella nidulans
gaattcactgcggccgccatgggctcctggcaggcgaatcc

SEQ ID NO: 37587 - DNA, 44 bp, Emericella nidulans
gttctcgagacgagcgatcgcgcccactcctccattttccttga

SEQ ID NO: 37588 - DNA, 49 bp, Emericella nidulans
gaattcactgcggccgccatgcccgagtccgaaaaagagaaaatactgc

SEQ ID NO: 37589 - DNA, 47 bp, Emericella nidulans
gttctcgagacgagcgatcgccattgcgtaaatcggggtctagagga

SEQ ID NO: 37590 - DNA, 49 bp, Emericella nidulans
gaattcactgcggccgccatgaacaaaatgtctgtcgctagaactgctg

SEQ ID NO: 37591 - DNA, 41 bp, Emericella nidulans
gttctcgagacgagcgatcgctggggatggtcacggtccag

SEQ ID NO: 37592 - DNA, 42 bp, Emericella nidulans
gaattcactgcggccgccatgctgatcggacagttctccttg

SEQ ID NO: 37593 - DNA, 42 bp, Emericella nidulans
gttctcgagacgagcgatcgcgccggaatcgatttcaaatta

SEQ ID NO: 37594 - DNA, 49 bp, Emericella nidulans
gaattcactgcggccgccatgaccaccataaccaccattcacatttatt

SEQ ID NO: 37595 - DNA, 49 bp, Emericella nidulans
gttctcgagacgagcgatcgcgaagctggaaatagatcgcctgcgcttg

SEQ ID NO: 37596 - DNA, 41 bp, Emericella nidulans
gaattcactgcggccgccatgaaggtgatgtgcggattctc

SEQ ID NO: 37597 - DNA, 41 bp, Emericella nidulans
gttctcgagacgagcgatcgcactctccaccctccttcctg

SEQ ID NO: 37598 - DNA, 41 bp, Emericella nidulans
gaattcactgcggccgccatgccgggatggaccgagcacaa

SEQ ID NO: 37599 - DNA, 48 bp, Emericella nidulans
gttctcgagacgagcgatcgcattcctctcgtcttctccttcgctgtc

SEQ ID NO: 37600 - DNA, 41 bp, Emericella nidulans
gaattcactgcggccgccatgggaagcagtctgcaactttc

SEQ ID NO: 37601 - DNA, 44 bp, Emericella nidulans
gttctcgagacgagcgatcgccgctggtaaagacaagtacaatg

SEQ ID NO: 37602 - DNA, 41 bp, Emericella nidulans
gaattcactgcggccgccatgcaaccgtataccccttcacg

SEQ ID NO: 37603 - DNA, 41 bp, Emericella nidulans
gttctcgagacgagcgatcgcgtaccagcccaggagcacta

SEQ ID NO: 37604 - DNA, 49 bp, Emericella nidulans
gaattcactgcggccgccatgtccatatgatacgggactaacatcaagg

SEQ ID NO: 37605 - DNA, 49 bp, Emericella nidulans
gttctcgagacgagcgatcgcgatcaagtattgctcactctcagcgact

SEQ ID NO: 37606 - DNA, 41 bp, Emericella nidulans
gaattcactgcggccgccatggcaacgccattgacggtccc

SEQ ID NO: 37607 - DNA, 45 bp, Emericella nidulans
gttctcgagacgagcgatcgccaaagcattcccttacccccatcg

SEQ ID NO: 37608 - DNA, 48 bp, Emericella nidulans
gaattcactgcggccgccatgtcaggctacttttggtcggatcaagtc

SEQ ID NO: 37609 - DNA, 41 bp, Emericella nidulans
gttctcgagacgagcgatcgcccgcagccatgtcaaagtgc

SEQ ID NO: 37610 - DNA, 43 bp, Emericella nidulans
gaattcactgcggccgccatgccagacttatcccggccctctc

SEQ ID NO: 37611 - DNA, 41 bp, Emericella nidulans
gttctcgagacgagcgatcgccggcggagtcgctgttgcta

SEQ ID NO: 37612 - DNA, 41 bp, Emericella nidulans
gaattcactgcggccgccatggatcgctggcgctggcagta

SEQ ID NO: 37613 - DNA, 44 bp, Emericella nidulans
gttctcgagacgagcgatcgcccccatccagatcgatatccaga

SEQ ID NO: 37614 - DNA, 41 bp, Emericella nidulans
gaattcactgcggccgccatgatgtcaccgcaaaacctttc

SEQ ID NO: 37615 - DNA, 41 bp, Emericella nidulans
gttctcgagacgagcgatcgcagcttctgtgtccgagcact

SEQ ID NO: 37616 - DNA, 45 bp, Emericella nidulans
gaattcactgcggccgccatgtcccggtactgagggtcctgttga

SEQ ID NO: 37617 - DNA, 41 bp, Emericella nidulans
gttctcgagacgagcgatcgctcgaccaaggcacgcacgac

SEQ ID NO: 37618 - DNA, 41 bp, Emericella nidulans
gaattcactgcggccgccatgctggttcgtaaccgtaaccc

SEQ ID NO: 37619 - DNA, 41 bp, Emericella nidulans
gttctcgagacgagcgatcgcgatgctctggctgaacatga

SEQ ID NO: 37620 - DNA, 41 bp, Emericella nidulans
gaattcactgcggccgccatgtgtgatggccacaccgcaga

SEQ ID NO: 37621 - DNA, 44 bp, Emericella nidulans
gttctcgagacgagcgatcgccttgcccattccattctgcatca

SEQ ID NO: 37622 - DNA, 43 bp, Emericella nidulans
gaattcactgcggccgccatgcgtcggtacgctcatggctcgt

SEQ ID NO: 37623 - DNA, 41 bp, Emericella nidulans
gttctcgagacgagcgatcgctcacagcgggggctttgtcc

SEQ ID NO: 37624 - DNA, 49 bp, Emericella nidulans
gaattcactgcggccgccatggattgcaagttttacgacctggccgatg

SEQ ID NO: 37625 - DNA, 48 bp, Emericella nidulans
gttctcgagacgagcgatcgcataatcgaacccgccatattagggtca

SEQ ID NO: 37626 - DNA, 48 bp, Emericella nidulans
gaattcactgcggccgccatgagacaagacggagatactcctcgtcca

SEQ ID NO: 37627 - DNA, 42 bp, Emericella nidulans
gttctcgagacgagcgatcgcgcaacgagccagtacggtggg

SEQ ID NO: 37628 - DNA, 41 bp, Emericella nidulans
gaattcactgcggccgccatgccgctgggcccgatgaacta

SEQ ID NO: 37629 - DNA, 47 bp, Emericella nidulans
gttctcgagacgagcgatcgcagaccttcgttggccttgattgaaca

SEQ ID NO: 37630 - DNA, 41 bp, Emericella nidulans
gaattcactgcggccgccatgcaagggtggctcttttggta

SEQ ID NO: 37631 - DNA, 41 bp, Emericella nidulans
gttctcgagacgagcgatcgccgactggtgcttgttcttca

SEQ ID NO: 37632 - DNA, 46 bp, Emericella nidulans
gaattcactgcggccgccatgtgatccccagtaccatgatgatccc

SEQ ID NO: 37633 - DNA, 47 bp, Emericella nidulans
gttctcgagacgagcgatcgcgtgtctatccaagaacagccgcaagg

SEQ ID NO: 37634 - DNA, 46 bp, Emericella nidulans
gaattcactgcggccgccatgtcaaccatgaaagccatcgtcactg

SEQ ID NO: 37635 - DNA, 49 bp, Emericella nidulans
gttctcgagacgagcgatcgctacgataatcaatcacataatccgcacc

SEQ ID NO: 37636 - DNA, 41 bp, Emericella nidulans
gaattcactgcggccgccatgaaccgctgtttgaactgctc

SEQ ID NO: 37637 - DNA, 41 bp, Emericella nidulans
gttctcgagacgagcgatcgctttgccgcacaggtattaaa

SEQ ID NO: 37638 - DNA, 49 bp, Emericella nidulans
gaattcactgcggccgccatgactggagctaaatatggcaaccaaacca

SEQ ID NO: 37639 - DNA, 45 bp, Emericella nidulans
gttctcgagacgagcgatcgcttgcaaatacctgcacagccaacc

SEQ ID NO: 37640 - DNA, 45 bp, Emericella nidulans
gaattcactgcggccgccatgaaatggttctcagccctggtcagc

SEQ ID NO: 37641 - DNA, 46 bp, Emericella nidulans
gttctcgagacgagcgatcgcgctttttagatgctaggccggtaca

SEQ ID NO: 37642 - DNA, 48 bp, Emericella nidulans
gaattcactgcggccgccatgggattgctggcagaatctacacaaagc

SEQ ID NO: 37643 - DNA, 41 bp, Emericella nidulans
gttctcgagacgagcgatcgcctcgcctccaagggccttcc

SEQ ID NO: 37644 - DNA, 41 bp, Emericella nidulans
gaattcactgcggccgccatgataatcccaccagcctggac

SEQ ID NO: 37645 - DNA, 45 bp, Emericella nidulans
gttctcgagacgagcgatcgcctacattctcagtagaacctctcc

SEQ ID NO: 37646 - DNA, 48 bp, Emericella nidulans
gaattcactgcggccgccatgcgctgcaaatttagatgaaggcagtcg

SEQ ID NO: 37647 - DNA, 46 bp, Emericella nidulans
gttctcgagacgagcgatcgcttttagcaagctgggatttcgtggg

SEQ ID NO: 37648 - DNA, 45 bp, Emericella nidulans
gaattcactgcggccgccatgtccaatctaaccgaggtcggtccc

SEQ ID NO: 37649 - DNA, 49 bp, Emericella nidulans
gttctcgagacgagcgatcgcagaattaaaggaagattctccccaatcc

SEQ ID NO: 37650 - DNA, 44 bp, Emericella nidulans
gaattcactgcggccgccatggctggcactagaaactatgactt

SEQ ID NO: 37651 - DNA, 41 bp, Emericella nidulans
gttctcgagacgagcgatcgctgtgacaccctcgctagcat

SEQ ID NO: 37652 - DNA, 45 bp, Emericella nidulans
gaattcactgcggccgccatgcttgcctgtacacggcaaaagcct

SEQ ID NO: 37653 - DNA, 49 bp, Emericella nidulans
gttctcgagacgagcgatcgcaaagagggtcataaaaccttcgcggata

SEQ ID NO: 37654 - DNA, 42 bp, Emericella nidulans
gaattcactgcggccgccatgttcaaggaaggcttgaagaaa

SEQ ID NO: 37655 - DNA, 41 bp, Emericella nidulans
gttctcgagacgagcgatcgcgctttgacgtctctccgttc

SEQ ID NO: 37656 - DNA, 41 bp, Emericella nidulans
gaattcactgcggccgccatgtcccgcagtacagactgatg

SEQ ID NO: 37657 - DNA, 41 bp, Emericella nidulans
gttctcgagacgagcgatcgccaggaaactggacgaggatt

SEQ ID NO: 37658 - DNA, 41 bp, Emericella nidulans
gaattcactgcggccgccatggattcgtccacaacacctcc

SEQ ID NO: 37659 - DNA, 41 bp, Emericella nidulans
gttctcgagacgagcgatcgctgcgagtaatcacgcagaac

SEQ ID NO: 37660 - DNA, 48 bp, Emericella nidulans
gaattcactgcggccgccatgtcagaacttctttggcaagggaaatcg

SEQ ID NO: 37661 - DNA, 42 bp, Emericella nidulans
gttctcgagacgagcgatcgcggatgacggctcgcacgagaa

SEQ ID NO: 37662 - DNA, 41 bp, Emericella nidulans
gaattcactgcggccgccatgcgcctatgccagtaaggatg

SEQ ID NO: 37663 - DNA, 41 bp, Emericella nidulans
gttctcgagacgagcgatcgcggacaggatgcgatccaata

SEQ ID NO: 37664 - DNA, 44 bp, Emericella nidulans
gaattcactgcggccgccatgacacatacgatttaggtgacact

SEQ ID NO: 37665 - DNA, 41 bp, Emericella nidulans
gttctcgagacgagcgatcgctgcaccttctccactaaccc

SEQ ID NO: 37666 - DNA, 42 bp, Emericella nidulans
gaattcactgcggccgccatgggtggttctgctaagctcttg

SEQ ID NO: 37667 - DNA, 41 bp, Emericella nidulans
gttctcgagacgagcgatcgcagggacatacaaccgcagtc

SEQ ID NO: 37668 - DNA, 41 bp, Emericella nidulans
gaattcactgcggccgccatggatcgccggctcgtcgtttg

SEQ ID NO: 37669 - DNA, 41 bp, Emericella nidulans
gttctcgagacgagcgatcgcctggtgcgctgggtgcagag

SEQ ID NO: 37670 - DNA, 41 bp, Emericella nidulans
gaattcactgcggccgccatgggcagacgctctggttgcag

SEQ ID NO: 37671 - DNA, 49 bp, Emericella nidulans
gttctcgagacgagcgatcgcctcctgagtattccagctcagggccata

SEQ ID NO: 37672 - DNA, 41 bp, Emericella nidulans
gaattcactgcggccgccatgcctacgctagcaactccacc

SEQ ID NO: 37673 - DNA, 47 bp, Emericella nidulans
gttctcgagacgagcgatcgcacattgaagatatcttgttaatgtgg

SEQ ID NO: 37674 - DNA, 41 bp, Emericella nidulans
gaattcactgcggccgccatgccgcgagtgaaaggtaaaaa

SEQ ID NO: 37675 - DNA, 41 bp, Emericella nidulans
gttctcgagacgagcgatcgctcgatatcagccaaaggagc

SEQ ID NO: 37676 - DNA, 41 bp, Emericella nidulans
gaattcactgcggccgccatggcccgtccaaccgtccagaa

SEQ ID NO: 37677 - DNA, 48 bp, Emericella nidulans
gttctcgagacgagcgatcgcctctcttaccgttaaccgcatcgtaca

SEQ ID NO: 37678 - DNA, 41 bp, Emericella nidulans
gaattcactgcggccgccatgacttgcgcagcgcaaggagg

SEQ ID NO: 37679 - DNA, 45 bp, Emericella nidulans
gttctcgagacgagcgatcgctgcctgagcaaccttctcgttctc

SEQ ID NO: 37680 - DNA, 44 bp, Emericella nidulans
gaattcactgcggccgccatgttgctttgccgatcgtcacttct

SEQ ID NO: 37681 - DNA, 49 bp, Emericella nidulans
gttctcgagacgagcgatcgccagtgatagggggaattgccttaccaag

SEQ ID NO: 37682 - DNA, 41 bp, Emericella nidulans
gaattcactgcggccgccatgcgtactcgtcggcttttctt

SEQ ID NO: 37683 - DNA, 43 bp, Emericella nidulans
gttctcgagacgagcgatcgcttgttaaacaaaggcaaaatgg

SEQ ID NO: 37684 - DNA, 41 bp, Emericella nidulans
gaattcactgcggccgccatggactgtcggtgccgctggtg

SEQ ID NO: 37685 - DNA, 41 bp, Emericella nidulans
gttctcgagacgagcgatcgcccgttcccccgagattgctg

SEQ ID NO: 37686 - DNA, 43 bp, Emericella nidulans
gaattcactgcggccgccatgggaatttcacggccttgttcca

SEQ ID NO: 37687 - DNA, 49 bp, Emericella nidulans
gttctcgagacgagcgatcgcggaacgcgaaaataggtatagatgatgc

SEQ ID NO: 37688 - DNA, 43 bp, Emericella nidulans
gaattcactgcggccgccatggccaagacatatcgtattgcta

SEQ ID NO: 37689 - DNA, 39 bp, Emericella nidulans
gttctcgagacgagcgatcgcacctcatcccacagcacc

SEQ ID NO: 37690 - DNA, 41 bp, Emericella nidulans
gaattcactgcggccgccatgcaaggggccttgccgtcatc

SEQ ID NO: 37691 - DNA, 43 bp, Emericella nidulans
gttctcgagacgagcgatcgcggattgggcctcccggagagtt

SEQ ID NO: 37692 - DNA, 41 bp, Emericella nidulans
gaattcactgcggccgccatgcgctcgccgagaacaaccgt

SEQ ID NO: 37693 - DNA, 49 bp, Emericella nidulans
gttctcgagacgagcgatcgcatataggacaacaaaagagacgcgggac

SEQ ID NO: 37694 - DNA, 48 bp, Emericella nidulans
gaattcactgcggccgccatgttgactgaatcgaacagcataacatca

SEQ ID NO: 37695 - DNA, 46 bp, Emericella nidulans
gttctcgagacgagcgatcgcaactcccttttgatctccccctccc

SEQ ID NO: 37696 - DNA, 41 bp, Emericella nidulans
gaattcactgcggccgccatgcggaagcaatcgcccgacat

SEQ ID NO: 37697 - DNA, 43 bp, Emericella nidulans
gttctcgagacgagcgatcgcgaaaggggaggcacaagcaagc

SEQ ID NO: 37698 - DNA, 47 bp, Emericella nidulans
gaattcactgcggccgccatgtcgtgtccacatacaccgtgtgattc

SEQ ID NO: 37699 - DNA, 45 bp, Emericella nidulans
gttctcgagacgagcgatcgcgacgaaggtgtgcggtctttctca

SEQ ID NO: 37700 - DNA, 41 bp, Emericella nidulans
gaattcactgcggccgccatgtgttggtctatgtccgcaaa

SEQ ID NO: 37701 - DNA, 41 bp, Emericella nidulans
gttctcgagacgagcgatcgcactcttgcgcacgtatgttg

SEQ ID NO: 37702 - DNA, 41 bp, Emericella nidulans
gaattcactgcggccgccatgggtgctgcgggcttcattgg

SEQ ID NO: 37703 - DNA, 41 bp, Emericella nidulans
gttctcgagacgagcgatcgcgggcgagcagagccacgact

SEQ ID NO: 37704 - DNA, 41 bp, Emericella nidulans
gaattcactgcggccgccatggccctgcaacagagggttcc

SEQ ID NO: 37705 - DNA, 49 bp, Emericella nidulans
gttctcgagacgagcgatcgctctctttggtagcctcatatttcgacct

SEQ ID NO: 37706 - DNA, 42 bp, Emericella nidulans
gaattcactgcggccgccatgggaaaagatattcgcccgtta

SEQ ID NO: 37707 - DNA, 46 bp, Emericella nidulans
gttctcgagacgagcgatcgcgttagcttctctaacaagacgcaga

SEQ ID NO: 37708 - DNA, 41 bp, Emericella nidulans
gaattcactgcggccgccatggctattcgcgcctccggtgc

SEQ ID NO: 37709 - DNA, 49 bp, Emericella nidulans
gttctcgagacgagcgatcgcacgaaatacggctgcaagatttccgagt

SEQ ID NO: 37710 - DNA, 41 bp, Emericella nidulans
gaattcactgcggccgccatggcacgattgaaggcgacggt

SEQ ID NO: 37711 - DNA, 41 bp, Emericella nidulans
gttctcgagacgagcgatcgcgcgggactggcgacgaattt

SEQ ID NO: 37712 - DNA, 49 bp, Emericella nidulans
gaattcactgcggccgccatgccagattgggagtagtactggcgccctc

SEQ ID NO: 37713 - DNA, 44 bp, Emericella nidulans
gttctcgagacgagcgatcgcggccggtcaagctcgccaataaa

SEQ ID NO: 37714 - DNA, 47 bp, Emericella nidulans
gaattcactgcggccgccatggacgggatcgacttctcggcaagaca

SEQ ID NO: 37715 - DNA, 42 bp, Emericella nidulans
gttctcgagacgagcgatcgctggtgttggcgcatcatacgg

SEQ ID NO: 37716 - DNA, 41 bp, Emericella nidulans
gaattcactgcggccgccatgtggcggtctgtttgggggtc

SEQ ID NO: 37717 - DNA, 47 bp, Emericella nidulans
gttctcgagacgagcgatcgctgccatacagtttttgaaccctgctg

SEQ ID NO: 37718 - DNA, 41 bp, Emericella nidulans
gaattcactgcggccgccatggcatttggcagtatccccta

SEQ ID NO: 37719 - DNA, 41 bp, Emericella nidulans
gttctcgagacgagcgatcgccaccaaagcagcaagaaaca

SEQ ID NO: 37720 - DNA, 45 bp, Emericella nidulans
gaattcactgcggccgccatggcttcccatatcgtcgcagattca

SEQ ID NO: 37721 - DNA, 42 bp, Emericella nidulans
gttctcgagacgagcgatcgcggcacgcttgatcggatacgg

SEQ ID NO: 37722 - DNA, 44 bp, Emericella nidulans
gaattcactgcggccgccatgtacgtccggaagtaccggtaagc

SEQ ID NO: 37723 - DNA, 48 bp, Emericella nidulans
gttctcgagacgagcgatcgccacatcttgtggtcaatttctcccagt

SEQ ID NO: 37724 - DNA, 41 bp, Emericella nidulans
gaattcactgcggccgccatgattccgtaccgttggacctt

SEQ ID NO: 37725 - DNA, 41 bp, Emericella nidulans
gttctcgagacgagcgatcgcagagctgcggtactgttggt

SEQ ID NO: 37726 - DNA, 41 bp, Emericella nidulans
gaattcactgcggccgccatgtcgttcttcgtcaaaccaaa

SEQ ID NO: 37727 - DNA, 43 bp, Emericella nidulans
gttctcgagacgagcgatcgccctccgagtctaactcttctcc

SEQ ID NO: 37728 - DNA, 41 bp, Emericella nidulans
gaattcactgcggccgccatgagcttcagcggataaaacga

SEQ ID NO: 37729 - DNA, 41 bp, Emericella nidulans
gttctcgagacgagcgatcgctctgctagctctcgctcctc

SEQ ID NO: 37730 - DNA, 40 bp, Emericella nidulans
gaattcactgcggccgccatggaggcgggcgccgaagaag

SEQ ID NO: 37731 - DNA, 41 bp, Emericella nidulans
gttctcgagacgagcgatcgcccgtgaggcgagtggcttgg

SEQ ID NO: 37732 - DNA, 44 bp, Emericella nidulans
gaattcactgcggccgccatggccatgtgtctcggtttggtgtg

SEQ ID NO: 37733 - DNA, 49 bp, Emericella nidulans
gttctcgagacgagcgatcgctgaagcgaagagaggtaggtagcggtgt

SEQ ID NO: 37734 - DNA, 48 bp, Emericella nidulans
gaattcactgcggccgccatgcccatgtttttattgcaaggatgctga

SEQ ID NO: 37735 - DNA, 41 bp, Emericella nidulans
gttctcgagacgagcgatcgccgcctgcagattccgggtca

SEQ ID NO: 37736 - DNA, 41 bp, Emericella nidulans
gaattcactgcggccgccatgcgtccgacgtaggaaataca

SEQ ID NO: 37737 - DNA, 42 bp, Emericella nidulans
gttctcgagacgagcgatcgcccattcggataattgatgagc

SEQ ID NO: 37738 - DNA, 45 bp, Emericella nidulans
gaattcactgcggccgccatgaagcagcaggaaaagctacggtca

SEQ ID NO: 37739 - DNA, 44 bp, Emericella nidulans
gttctcgagacgagcgatcgcccatgctgtggaaaaccatggag

SEQ ID NO: 37740 - DNA, 45 bp, Emericella nidulans
gaattcactgcggccgccatgaaaaagaaggaaagaaggaaagaa

SEQ ID NO: 37741 - DNA, 45 bp, Emericella nidulans
gttctcgagacgagcgatcgcctggtatccctgaataacaacctt

SEQ ID NO: 37742 - DNA, 43 bp, Emericella nidulans
gaattcactgcggccgccatgttgctgccatccaatcagacca

SEQ ID NO: 37743 - DNA, 49 bp, Emericella nidulans
gttctcgagacgagcgatcgctcaggttcccacgtatctaccacaatca

SEQ ID NO: 37744 - DNA, 42 bp, Emericella nidulans
gaattcactgcggccgccatgtcgggaagcttgccgacgaat

SEQ ID NO: 37745 - DNA, 48 bp, Emericella nidulans
gttctcgagacgagcgatcgcgcaagagtcttccctgttcctgtaccc

SEQ ID NO: 37746 - DNA, 41 bp, Emericella nidulans
gaattcactgcggccgccatgtgtgcggtctgcatgggtga

SEQ ID NO: 37747 - DNA, 41 bp, Emericella nidulans
gttctcgagacgagcgatcgccggtgccctgctcaggtgtg

SEQ ID NO: 37748 - DNA, 40 bp, Emericella nidulans
gaattcactgcggccgccatggtaccccaaggcgaatgtc

SEQ ID NO: 37749 - DNA, 47 bp, Emericella nidulans
gttctcgagacgagcgatcgcgagacaatctacgcgagttatttagg

SEQ ID NO: 37750 - DNA, 47 bp, Emericella nidulans
gaattcactgcggccgccatgtggtgctggcaaaatctaaaaactcg

SEQ ID NO: 37751 - DNA, 41 bp, Emericella nidulans
gttctcgagacgagcgatcgccaaaccccgtcgccagtcca

SEQ ID NO: 37752 - DNA, 49 bp, Emericella nidulans
gaattcactgcggccgccatgagatagctgtaagagcaattcaggcaga

SEQ ID NO: 37753 - DNA, 49 bp, Emericella nidulans
gttctcgagacgagcgatcgcactaagtctctttaggtgctgggcgagt

SEQ ID NO: 37754 - DNA, 41 bp, Emericella nidulans
gaattcactgcggccgccatgcgcctacccaatccacatta

SEQ ID NO: 37755 - DNA, 41 bp, Emericella nidulans
gttctcgagacgagcgatcgccgattctgcagcttgtcagt

SEQ ID NO: 37756 - DNA, 43 bp, Emericella nidulans
gaattcactgcggccgccatgacggaagctcctgatggcgttg

SEQ ID NO: 37757 - DNA, 49 bp, Emericella nidulans
gttctcgagacgagcgatcgcacacacttctcacaagcgctttcgatct

SEQ ID NO: 37758 - DNA, 43 bp, Emericella nidulans
gaattcactgcggccgccatggtcgggattgaaacggcgaaga

SEQ ID NO: 37759 - DNA, 41 bp, Emericella nidulans
gttctcgagacgagcgatcgcgaggccacggtcggagatgg

SEQ ID NO: 37760 - DNA, 41 bp, Emericella nidulans
gaattcactgcggccgccatgaacgatgccggatatgactc

SEQ ID NO: 37761 - DNA, 41 bp, Emericella nidulans
gttctcgagacgagcgatcgcacgcccgttttgttcttctt

SEQ ID NO: 37762 - DNA, 41 bp, Emericella nidulans
gaattcactgcggccgccatgtcgtttgcatcctctcgtat

SEQ ID NO: 37763 - DNA, 41 bp, Emericella nidulans
gttctcgagacgagcgatcgcgccgagcagtgcatacataa

SEQ ID NO: 37764 - DNA, 41 bp, Emericella nidulans
gaattcactgcggccgccatgccaatgttgggcagcgtggc

SEQ ID NO: 37765 - DNA, 41 bp, Emericella nidulans
gttctcgagacgagcgatcgcgtgcccgtgcggtcaatggt

SEQ ID NO: 37766 - DNA, 41 bp, Emericella nidulans
gaattcactgcggccgccatgtcagatcttgatgctgccac

SEQ ID NO: 37767 - DNA, 41 bp, Emericella nidulans
gttctcgagacgagcgatcgccataggaaggctgcattgaa

SEQ ID NO: 37768 - DNA, 42 bp, Emericella nidulans
gaattcactgcggccgccatgtgtattcaccttccttctccc

SEQ ID NO: 37769 - DNA, 41 bp, Emericella nidulans
gttctcgagacgagcgatcgccgacccatcatgagaatggt

SEQ ID NO: 37770 - DNA, 49 bp, Emericella nidulans
gaattcactgcggccgccatgaacaaggtcctatacgttcgctcggtgc

SEQ ID NO: 37771 - DNA, 49 bp, Emericella nidulans
gttctcgagacgagcgatcgctttgtatttagaaactccagcgccatag

SEQ ID NO: 37772 - DNA, 47 bp, Emericella nidulans
gaattcactgcggccgccatgcggctatctggagtatcgaccagttc

SEQ ID NO: 37773 - DNA, 47 bp, Emericella nidulans
gttctcgagacgagcgatcgcgcaccctctaatgctttgagtcttcg

SEQ ID NO: 37774 - DNA, 41 bp, Emericella nidulans
gaattcactgcggccgccatggtgtgggcagcggcttaacg

SEQ ID NO: 37775 - DNA, 43 bp, Emericella nidulans
gttctcgagacgagcgatcgccgcaacgtcagcctcgaaatca

SEQ ID NO: 37776 - DNA, 43 bp, Emericella nidulans
gaattcactgcggccgccatgacgtggcgtgcgactcttacca

SEQ ID NO: 37777 - DNA, 41 bp, Emericella nidulans
gttctcgagacgagcgatcgcgggttcagcccagtcgccta

SEQ ID NO: 37778 - DNA, 49 bp, Emericella nidulans
gaattcactgcggccgccatgcctcactttagccaaccttctccgctca

SEQ ID NO: 37779 - DNA, 48 bp, Emericella nidulans
gttctcgagacgagcgatcgccctctgcttccagaaagtagcccttgg

SEQ ID NO: 37780 - DNA, 41 bp, Emericella nidulans
gaattcactgcggccgccatggccactccgagcgcatcctc

SEQ ID NO: 37781 - DNA, 48 bp, Emericella nidulans
gttctcgagacgagcgatcgcactagatgataaaacgggaacgcagga

SEQ ID NO: 37782 - DNA, 42 bp, Emericella nidulans
gaattcactgcggccgccatgtgacccaacgatcgcgatgac

SEQ ID NO: 37783 - DNA, 43 bp, Emericella nidulans
gttctcgagacgagcgatcgcatcgttggacttcttgggctcc

SEQ ID NO: 37784 - DNA, 41 bp, Emericella nidulans
gaattcactgcggccgccatgcgctggcacttgcctgcact

SEQ ID NO: 37785 - DNA, 49 bp, Emericella nidulans
gttctcgagacgagcgatcgcaaagtaatcgcccattggactggcaata

SEQ ID NO: 37786 - DNA, 49 bp, Emericella nidulans
gaattcactgcggccgccatgaactcactgtgcaatagatatccccctc

SEQ ID NO: 37787 - DNA, 49 bp, Emericella nidulans
gttctcgagacgagcgatcgcgaagagttcatcatatccagggcgacga

SEQ ID NO: 37788 - DNA, 42 bp, Emericella nidulans
gaattcactgcggccgccatgcaaagcctaccccgggctcac

SEQ ID NO: 37789 - DNA, 41 bp, Emericella nidulans
gttctcgagacgagcgatcgcgtcgccggcatcgtagtggg

SEQ ID NO: 37790 - DNA, 49 bp, Emericella nidulans
gaattcactgcggccgccatgacctaatctaatcctaatctcgcccacc

SEQ ID NO: 37791 - DNA, 44 bp, Emericella nidulans
gttctcgagacgagcgatcgcgctgctgtgggtcttgctcttgc

SEQ ID NO: 37792 - DNA, 49 bp, Emericella nidulans
gaattcactgcggccgccatggatattcttattgaaaaagcacgccaaa

SEQ ID NO: 37793 - DNA, 46 bp, Emericella nidulans
gttctcgagacgagcgatcgcgaactccaggagccattcacgcata

SEQ ID NO: 37794 - DNA, 41 bp, Emericella nidulans
gaattcactgcggccgccatgtcagaaacgtctcgacaagg

SEQ ID NO: 37795 - DNA, 46 bp, Emericella nidulans
gttctcgagacgagcgatcgctacatcagtcactattgcagccatc

SEQ ID NO: 37796 - DNA, 41 bp, Emericella nidulans
gaattcactgcggccgccatggctgatgtccggcggtgctt

SEQ ID NO: 37797 - DNA, 40 bp, Emericella nidulans
gttctcgagacgagcgatcgccgatcggtgcgggcctctt

SEQ ID NO: 37798 - DNA, 43 bp, Emericella nidulans
gaattcactgcggccgccatgccttcagatccatcggcgcaac

SEQ ID NO: 37799 - DNA, 41 bp, Emericella nidulans
gttctcgagacgagcgatcgcaaacgagtcccgcgtggtgc

SEQ ID NO: 37800 - DNA, 49 bp, Emericella nidulans
gaattcactgcggccgccatgctattcattaaaccccgaactgcgctga

SEQ ID NO: 37801 - DNA, 49 bp, Emericella nidulans
gttctcgagacgagcgatcgccatagtaaacccggttacagagcgtgcc

SEQ ID NO: 37802 - DNA, 41 bp, Emericella nidulans
gaattcactgcggccgccatgtacctggccgattactttgg

SEQ ID NO: 37803 - DNA, 42 bp, Emericella nidulans
gttctcgagacgagcgatcgccagatcatgcatgtgatttcc

SEQ ID NO: 37804 - DNA, 49 bp, Emericella nidulans
gaattcactgcggccgccatgctcgaaaagagaaccgaaaaccgcgaac

SEQ ID NO: 37805 - DNA, 41 bp, Emericella nidulans
gttctcgagacgagcgatcgcgtcccaacgcttccccagca

SEQ ID NO: 37806 - DNA, 42 bp, Emericella nidulans
gaattcactgcggccgccatgtgggagaaagctggaggtcgt

SEQ ID NO: 37807 - DNA, 46 bp, Emericella nidulans
gttctcgagacgagcgatcgcactgggcgtgaacatgatacggatt

SEQ ID NO: 37808 - DNA, 41 bp, Emericella nidulans
gaattcactgcggccgccatgctggtcttcgaacacaccac

SEQ ID NO: 37809 - DNA, 41 bp, Emericella nidulans
gttctcgagacgagcgatcgccacacagagcgctgcatact

SEQ ID NO: 37810 - DNA, 42 bp, Emericella nidulans
gaattcactgcggccgccatgcaccataaccgggaccctgga

SEQ ID NO: 37811 - DNA, 44 bp, Emericella nidulans
gttctcgagacgagcgatcgccagacgtcgtgcccaggagtcaa

SEQ ID NO: 37812 - DNA, 41 bp, Emericella nidulans
gaattcactgcggccgccatgtgcacttgggggtgctgacg

SEQ ID NO: 37813 - DNA, 43 bp, Emericella nidulans
gttctcgagacgagcgatcgcgttgctctggatgctgcgggtg

SEQ ID NO: 37814 - DNA, 41 bp, Emericella nidulans
gaattcactgcggccgccatgcagcgcctgtttgatgagta

SEQ ID NO: 37815 - DNA, 40 bp, Emericella nidulans
gttctcgagacgagcgatcgcggccaaggacctcaagaaa

SEQ ID NO: 37816 - DNA, 49 bp, Emericella nidulans
gaattcactgcggccgccatggctctattcgtcgtaggacccatcttcg

SEQ ID NO: 37817 - DNA, 45 bp, Emericella nidulans
gttctcgagacgagcgatcgcgagacagtgccctgcgtgtagtcg

SEQ ID NO: 37818 - DNA, 41 bp, Emericella nidulans
gaattcactgcggccgccatgcagggtggcaattatggaac

SEQ ID NO: 37819 - DNA, 41 bp, Emericella nidulans
gttctcgagacgagcgatcgcttgatttcagctccctggtc

SEQ ID NO: 37820 - DNA, 40 bp, Emericella nidulans
gaattcactgcggccgccatggtcagccccctcagctaac

SEQ ID NO: 37821 - DNA, 41 bp, Emericella nidulans
gttctcgagacgagcgatcgcgtttgcatcgctgatttgtg

SEQ ID NO: 37822 - DNA, 49 bp, Emericella nidulans
gaattcactgcggccgccatgatcttcctcctttcagatcaaccgctca

SEQ ID NO: 37823 - DNA, 49 bp, Emericella nidulans
gttctcgagacgagcgatcgctcgcacatacttcgacataaacttcttg

SEQ ID NO: 37824 - DNA, 47 bp, Emericella nidulans
gaattcactgcggccgccatgcaggatgcggagaaattgttgaatgg

SEQ ID NO: 37825 - DNA, 42 bp, Emericella nidulans
gttctcgagacgagcgatcgccgccgttcttgtagcacagca

SEQ ID NO: 37826 - DNA, 41 bp, Emericella nidulans
gaattcactgcggccgccatgtgctagcttgatggtcaacg

SEQ ID NO: 37827 - DNA, 39 bp, Emericella nidulans
gttctcgagacgagcgatcgcgctgagaaacgcagtgcc

SEQ ID NO: 37828 - DNA, 42 bp, Emericella nidulans
gaattcactgcggccgccatggcaaggcgtcgtccaaacaca

SEQ ID NO: 37829 - DNA, 47 bp, Emericella nidulans
gttctcgagacgagcgatcgccctattctcttcaacccgccgtaaca

SEQ ID NO: 37830 - DNA, 44 bp, Emericella nidulans
gaattcactgcggccgccatggccatggtcggtctgactatcaa

SEQ ID NO: 37831 - DNA, 46 bp, Emericella nidulans
gttctcgagacgagcgatcgcgcgatagggatcgggacaagtttgg

SEQ ID NO: 37832 - DNA, 47 bp, Emericella nidulans
gaattcactgcggccgccatgccgaaaaagcgtatcgagtgaatcgt

SEQ ID NO: 37833 - DNA, 41 bp, Emericella nidulans
gttctcgagacgagcgatcgcatggcgcaatgtcgctgctg

SEQ ID NO: 37834 - DNA, 44 bp, Emericella nidulans
gaattcactgcggccgccatgatctctgacgtctacatttccaa

SEQ ID NO: 37835 - DNA, 39 bp, Emericella nidulans
gttctcgagacgagcgatcgcctcctcggcagacacagg

SEQ ID NO: 37836 - DNA, 46 bp, Emericella nidulans
gaattcactgcggccgccatgcggtgtcattcttctcactctcagc

SEQ ID NO: 37837 - DNA, 41 bp, Emericella nidulans
gttctcgagacgagcgatcgcggcatcggtaggcggaccag

SEQ ID NO: 37838 - DNA, 42 bp, Emericella nidulans
gaattcactgcggccgccatgggcggctctagccatcgcaac

SEQ ID NO: 37839 - DNA, 49 bp, Emericella nidulans
gttctcgagacgagcgatcgcgaagagttagcagagtcaacctggaaga

SEQ ID NO: 37840 - DNA, 41 bp, Emericella nidulans
gaattcactgcggccgccatggacactagcttgctgcgaga

SEQ ID NO: 37841 - DNA, 44 bp, Emericella nidulans
gttctcgagacgagcgatcgcttttgagcgcatttgtaataaag

SEQ ID NO: 37842 - DNA, 48 bp, Emericella nidulans
gaattcactgcggccgccatggcgagacaaccagtccgtctggaggaa

SEQ ID NO: 37843 - DNA, 49 bp, Emericella nidulans
gttctcgagacgagcgatcgcatactccagaataacccaggtctgatcg

SEQ ID NO: 37844 - DNA, 41 bp, Emericella nidulans
gaattcactgcggccgccatgaacaggcaccggtaaaactg

SEQ ID NO: 37845 - DNA, 39 bp, Emericella nidulans
gttctcgagacgagcgatcgcgacgccgaagacgatgat

SEQ ID NO: 37846 - DNA, 41 bp, Emericella nidulans
gaattcactgcggccgccatgcgcaatcgcagtcgcaatcg

SEQ ID NO: 37847 - DNA, 41 bp, Emericella nidulans
gttctcgagacgagcgatcgctccagcccctcaaccccgta

SEQ ID NO: 37848 - DNA, 42 bp, Emericella nidulans
gaattcactgcggccgccatgtgttcccgagtccattactga

SEQ ID NO: 37849 - DNA, 41 bp, Emericella nidulans
gttctcgagacgagcgatcgccatccccttcccaaatttct

SEQ ID NO: 37850 - DNA, 49 bp, Emericella nidulans
gaattcactgcggccgccatgtacattgataagcgggtatgctcggaat

SEQ ID NO: 37851 - DNA, 45 bp, Emericella nidulans
gttctcgagacgagcgatcgccccccgtattttacaacactgcaa

SEQ ID NO: 37852 - DNA, 45 bp, Emericella nidulans
gaattcactgcggccgccatggtcaccgggtacgttgcatatttt

SEQ ID NO: 37853 - DNA, 45 bp, Emericella nidulans
gttctcgagacgagcgatcgctggtgtttccgtaggggtttgtcg

SEQ ID NO: 37854 - DNA, 45 bp, Emericella nidulans
gaattcactgcggccgccatgcaattggtagggtcccttctatac

SEQ ID NO: 37855 - DNA, 48 bp, Emericella nidulans
gttctcgagacgagcgatcgccttctatttagatatcttagcgactgc

SEQ ID NO: 37856 - DNA, 41 bp, Emericella nidulans
gaattcactgcggccgccatggaaagccatgtcgaagccta

SEQ ID NO: 37857 - DNA, 41 bp, Emericella nidulans
gttctcgagacgagcgatcgccgcagtatatctgcaatccc

SEQ ID NO: 37858 - DNA, 49 bp, Emericella nidulans
gaattcactgcggccgccatgccattacgtcgttatattttgacaaccc

SEQ ID NO: 37859 - DNA, 42 bp, Emericella nidulans
gttctcgagacgagcgatcgcggcgttctttgcctggcgttc

SEQ ID NO: 37860 - DNA, 49 bp, Emericella nidulans
gaattcactgcggccgccatgtcacatacctcctaacaggagacacagc

SEQ ID NO: 37861 - DNA, 48 bp, Emericella nidulans
gttctcgagacgagcgatcgcgacttagattccctctcgtccccttgc

SEQ ID NO: 37862 - DNA, 41 bp, Emericella nidulans
gaattcactgcggccgccatgtggccatggccgaggaccta

SEQ ID NO: 37863 - DNA, 49 bp, Emericella nidulans
gttctcgagacgagcgatcgctcagccatattcaaacatacacaaaagc

SEQ ID NO: 37864 - DNA, 48 bp, Emericella nidulans
gaattcactgcggccgccatgtcttcgctttacattcccaagatttca

SEQ ID NO: 37865 - DNA, 43 bp, Emericella nidulans
gttctcgagacgagcgatcgcgtcgattggccacccattccct

SEQ ID NO: 37866 - DNA, 49 bp, Emericella nidulans
gaattcactgcggccgccatgaggatgaattcacatggagaagatcgtg

SEQ ID NO: 37867 - DNA, 43 bp, Emericella nidulans
gttctcgagacgagcgatcgctctatgcgggaagaccgctcca

SEQ ID NO: 37868 - DNA, 41 bp, Emericella nidulans
gaattcactgcggccgccatgggcacaaggtcaatgttcct

SEQ ID NO: 37869 - DNA, 44 bp, Emericella nidulans
gttctcgagacgagcgatcgcgagtttcatcttctcctctcctg

SEQ ID NO: 37870 - DNA, 42 bp, Emericella nidulans
gaattcactgcggccgccatggcgacctccctgcttcggaaa

SEQ ID NO: 37871 - DNA, 45 bp, Emericella nidulans
gttctcgagacgagcgatcgctcacgacgatgttgacgttgattt

SEQ ID NO: 37872 - DNA, 41 bp, Emericella nidulans
gaattcactgcggccgccatgcgcgcatatcaagaatctcc

SEQ ID NO: 37873 - DNA, 39 bp, Emericella nidulans
gttctcgagacgagcgatcgcgcatcctgggcaattacg

SEQ ID NO: 37874 - DNA, 42 bp, Emericella nidulans
gaattcactgcggccgccatggaacagcacgcagccgaggtc

SEQ ID NO: 37875 - DNA, 45 bp, Emericella nidulans
gttctcgagacgagcgatcgctcaccctcatcatcctcatcttcg

SEQ ID NO: 37876 - DNA, 42 bp, Emericella nidulans
gaattcactgcggccgccatgccgctctacccacacccacca

SEQ ID NO: 37877 - DNA, 49 bp, Emericella nidulans
gttctcgagacgagcgatcgcaccctccttatccagataaaaccactgc

SEQ ID NO: 37878 - DNA, 41 bp, Emericella nidulans
gaattcactgcggccgccatggccgccgtgatcgttctcct

SEQ ID NO: 37879 - DNA, 41 bp, Emericella nidulans
gttctcgagacgagcgatcgcgggattggttcggcgggttt

SEQ ID NO: 37880 - DNA, 48 bp, Emericella nidulans
gaattcactgcggccgccatgatcaacagagcattgtacgcgcggaag

SEQ ID NO: 37881 - DNA, 48 bp, Emericella nidulans
gttctcgagacgagcgatcgctctatgcccaattctatggcaggtact

SEQ ID NO: 37882 - DNA, 41 bp, Emericella nidulans
gaattcactgcggccgccatgacgtcgacataccttgaggc

SEQ ID NO: 37883 - DNA, 41 bp, Emericella nidulans
gttctcgagacgagcgatcgctccaaccagcgttactgatg

SEQ ID NO: 37884 - DNA, 41 bp, Emericella nidulans
gaattcactgcggccgccatggaacctgtctcgcccctatt

SEQ ID NO: 37885 - DNA, 41 bp, Emericella nidulans
gttctcgagacgagcgatcgcgggggtggtgtcgatatttt

SEQ ID NO: 37886 - DNA, 46 bp, Emericella nidulans
gaattcactgcggccgccatgcgaagaaatacacataccaacttgc

SEQ ID NO: 37887 - DNA, 41 bp, Emericella nidulans
gttctcgagacgagcgatcgcgctggaaagagtgctggaac

SEQ ID NO: 37888 - DNA, 40 bp, Emericella nidulans
gaattcactgcggccgccatggcacatggcgaacagtttt

SEQ ID NO: 37889 - DNA, 41 bp, Emericella nidulans
gttctcgagacgagcgatcgcatatctgcctgccgtctcac

SEQ ID NO: 37890 - DNA, 43 bp, Emericella nidulans
gaattcactgcggccgccatgggcggccctaatttccagggag

SEQ ID NO: 37891 - DNA, 49 bp, Emericella nidulans
gttctcgagacgagcgatcgcttgaggacatctccaagttttccggtga

SEQ ID NO: 37892 - DNA, 46 bp, Emericella nidulans
gaattcactgcggccgccatgccgcagcagtcagatactgatcaaa

SEQ ID NO: 37893 - DNA, 49 bp, Emericella nidulans
gttctcgagacgagcgatcgctccttctgttccttctttaccttcatcc

SEQ ID NO: 37894 - DNA, 44 bp, Emericella nidulans
gaattcactgcggccgccatggtcgcatacctatcgggcgacga

SEQ ID NO: 37895 - DNA, 46 bp, Emericella nidulans
gttctcgagacgagcgatcgccgaatctgtttctcaagcaggtccc

SEQ ID NO: 37896 - DNA, 42 bp, Emericella nidulans
gaattcactgcggccgccatggggaacacgagtccacaacga

SEQ ID NO: 37897 - DNA, 40 bp, Emericella nidulans
gttctcgagacgagcgatcgcgccgactcggctgctccag

SEQ ID NO: 37898 - DNA, 41 bp, Emericella nidulans
gaattcactgcggccgccatgcttgctgggggagaggcagt

SEQ ID NO: 37899 - DNA, 43 bp, Emericella nidulans
gttctcgagacgagcgatcgccgatccatgacaccgccactgt

SEQ ID NO: 37900 - DNA, 41 bp, Emericella nidulans
gaattcactgcggccgccatgtcgattgccttctcgatacc

SEQ ID NO: 37901 - DNA, 42 bp, Emericella nidulans
gttctcgagacgagcgatcgccaccttgacaagcaagattcc

SEQ ID NO: 37902 - DNA, 45 bp, Emericella nidulans
gaattcactgcggccgccatggggctgcactggtagcaggcaaaa

SEQ ID NO: 37903 - DNA, 46 bp, Emericella nidulans
gttctcgagacgagcgatcgcgtgctcatgcctcttctcgctcttc

SEQ ID NO: 37904 - DNA, 41 bp, Emericella nidulans
gaattcactgcggccgccatgtccaggccggtcgaaagggt

SEQ ID NO: 37905 - DNA, 45 bp, Emericella nidulans
gttctcgagacgagcgatcgcagttcagcaacatcgtcgtgtccc

SEQ ID NO: 37906 - DNA, 47 bp, Emericella nidulans
gaattcactgcggccgccatgacggaagcaatagcacatattcgtga

SEQ ID NO: 37907 - DNA, 43 bp, Emericella nidulans
gttctcgagacgagcgatcgctttgttgaacccaccagccaca

SEQ ID NO: 37908 - DNA, 49 bp, Emericella nidulans
gaattcactgcggccgccatgggactgactctaagctagggttgcgatg

SEQ ID NO: 37909 - DNA, 49 bp, Emericella nidulans
gttctcgagacgagcgatcgcatgttataggcgattcgtcatactttgc

SEQ ID NO: 37910 - DNA, 46 bp, Emericella nidulans
gaattcactgcggccgccatgttgtcgggaggacgatacactctgg

SEQ ID NO: 37911 - DNA, 41 bp, Emericella nidulans
gttctcgagacgagcgatcgcgccctcgggtcccacgtctc

SEQ ID NO: 37912 - DNA, 42 bp, Emericella nidulans
gaattcactgcggccgccatgccggagatgtagcggtgttgg

SEQ ID NO: 37913 - DNA, 44 bp, Emericella nidulans
gttctcgagacgagcgatcgcggatgagtcgcgaggccttcgta

SEQ ID NO: 37914 - DNA, 40 bp, Emericella nidulans
gaattcactgcggccgccatgacccgaattgccacaactt

SEQ ID NO: 37915 - DNA, 41 bp, Emericella nidulans
gttctcgagacgagcgatcgcacgctcgcactcaaactgta

SEQ ID NO: 37916 - DNA, 45 bp, Emericella nidulans
gaattcactgcggccgccatggatcattgaaggcatccccaccgt

SEQ ID NO: 37917 - DNA, 46 bp, Emericella nidulans
gttctcgagacgagcgatcgcacagcataccgatatcgaggactca

SEQ ID NO: 37918 - DNA, 42 bp, Emericella nidulans
gaattcactgcggccgccatgcgaccatatgcttgatgtact

SEQ ID NO: 37919 - DNA, 41 bp, Emericella nidulans
gttctcgagacgagcgatcgccgctctcgtcgttttctttc

SEQ ID NO: 37920 - DNA, 39 bp, Emericella nidulans
gaattcactgcggccgccatggtagcgcgcggccacctc

SEQ ID NO: 37921 - DNA, 49 bp, Emericella nidulans
gttctcgagacgagcgatcgctttgacaatatccgtagagcttgtagcc

SEQ ID NO: 37922 - DNA, 41 bp, Emericella nidulans
gaattcactgcggccgccatggttgcaactgctgcaagact

SEQ ID NO: 37923 - DNA, 42 bp, Emericella nidulans
gttctcgagacgagcgatcgcgcaggtcccagtactcattct

SEQ ID NO: 37924 - DNA, 48 bp, Emericella nidulans
gaattcactgcggccgccatgtactcgtagacttatcactgactttcc

SEQ ID NO: 37925 - DNA, 41 bp, Emericella nidulans
gttctcgagacgagcgatcgccaaagcctggaggaggataa

SEQ ID NO: 37926 - DNA, 41 bp, Emericella nidulans
gaattcactgcggccgccatgtgcggggcaacctggacaac

SEQ ID NO: 37927 - DNA, 41 bp, Emericella nidulans
gttctcgagacgagcgatcgccgcccaggtttggcccaagt

SEQ ID NO: 37928 - DNA, 41 bp, Emericella nidulans
gaattcactgcggccgccatgggcgcctccctgcaaacatt

SEQ ID NO: 37929 - DNA, 46 bp, Emericella nidulans
gttctcgagacgagcgatcgcaagagcagcctttttctccagaggc

SEQ ID NO: 37930 - DNA, 40 bp, Emericella nidulans
gaattcactgcggccgccatgaaacgcgcccatgagtaat

SEQ ID NO: 37931 - DNA, 40 bp, Emericella nidulans
gttctcgagacgagcgatcgcaacgtgcatgaatcgcttg

SEQ ID NO: 37932 - DNA, 49 bp, Emericella nidulans
gaattcactgcggccgccatgaaaaagaactactatctattacccctaa

SEQ ID NO: 37933 - DNA, 49 bp, Emericella nidulans
gttctcgagacgagcgatcgccctgcttatattataaagcctaagtatt

SEQ ID NO: 37934 - DNA, 41 bp, Emericella nidulans
gaattcactgcggccgccatggcgacaggggttatgacctt

SEQ ID NO: 37935 - DNA, 41 bp, Emericella nidulans
gttctcgagacgagcgatcgcacccgatatcctcgtcaatg

SEQ ID NO: 37936 - DNA, 45 bp, Emericella nidulans
gaattcactgcggccgccatgtcgagtcacagtcccgcagccata

SEQ ID NO: 37937 - DNA, 48 bp, Emericella nidulans
gttctcgagacgagcgatcgccttcgacctccgctccatagtattcca

SEQ ID NO: 37938 - DNA, 41 bp, Emericella nidulans
gaattcactgcggccgccatgaatcgttatcgacggacagg

SEQ ID NO: 37939 - DNA, 39 bp, Emericella nidulans
gttctcgagacgagcgatcgcttattcgccgaattcctt

SEQ ID NO: 37940 - DNA, 41 bp, Emericella nidulans
gaattcactgcggccgccatgttcctgctcaacctgacctt

SEQ ID NO: 37941 - DNA, 39 bp, Emericella nidulans
gttctcgagacgagcgatcgcctggcacgtctcctgcac

SEQ ID NO: 37942 - DNA, 41 bp, Emericella nidulans
gaattcactgcggccgccatggtccgccgttcaatcggcac

SEQ ID NO: 37943 - DNA, 46 bp, Emericella nidulans
gttctcgagacgagcgatcgccaatctcactctcccacccccgaac

SEQ ID NO: 37944 - DNA, 47 bp, Emericella nidulans
gaattcactgcggccgccatgcattgttatagggcctggctgggaag

SEQ ID NO: 37945 - DNA, 45 bp, Emericella nidulans
gttctcgagacgagcgatcgctccatcacctttcccacactcagc

SEQ ID NO: 37946 - DNA, 41 bp, Emericella nidulans
gaattcactgcggccgccatggccatggcatggggtcatcc

SEQ ID NO: 37947 - DNA, 49 bp, Emericella nidulans
gttctcgagacgagcgatcgccgatccagctgaaagaacaactttaccc

SEQ ID NO: 37948 - DNA, 44 bp, Emericella nidulans
gaattcactgcggccgccatgcgtgatcatttccccctctgcaa

SEQ ID NO: 37949 - DNA, 41 bp, Emericella nidulans
gttctcgagacgagcgatcgccaaccgccgatcaacgtccc

SEQ ID NO: 37950 - DNA, 41 bp, Emericella nidulans
gaattcactgcggccgccatgggtaaccgtgctggagagta

SEQ ID NO: 37951 - DNA, 42 bp, Emericella nidulans
gttctcgagacgagcgatcgctgtaggcatcacaacatgagc

SEQ ID NO: 37952 - DNA, 42 bp, Emericella nidulans
gaattcactgcggccgccatgcaacccgcttatcaagattgt

SEQ ID NO: 37953 - DNA, 43 bp, Emericella nidulans
gttctcgagacgagcgatcgctccataaccatattccttcatt

SEQ ID NO: 37954 - DNA, 42 bp, Emericella nidulans
gaattcactgcggccgccatgcaatcgatcttctgcttcctg

SEQ ID NO: 37955 - DNA, 41 bp, Emericella nidulans
gttctcgagacgagcgatcgcgttgtcaaccaatgccacac

SEQ ID NO: 37956 - DNA, 41 bp, Emericella nidulans
gaattcactgcggccgccatgcccagcgcatgtcctccacc

SEQ ID NO: 37957 - DNA, 49 bp, Emericella nidulans
gttctcgagacgagcgatcgccgtcctctcgtaatattccactcgcact

SEQ ID NO: 37958 - DNA, 41 bp, Emericella nidulans
gaattcactgcggccgccatggccggccacctcctcctctc

SEQ ID NO: 37959 - DNA, 46 bp, Emericella nidulans
gttctcgagacgagcgatcgcatcccaaaaccgaattaccccgtct

SEQ ID NO: 37960 - DNA, 41 bp, Emericella nidulans
gaattcactgcggccgccatggcaaaagcaggttcttgagg

SEQ ID NO: 37961 - DNA, 41 bp, Emericella nidulans
gttctcgagacgagcgatcgcatatcagcgccaacttccag

SEQ ID NO: 37962 - DNA, 41 bp, Emericella nidulans
gaattcactgcggccgccatgcggcccccgaggcttctatg

SEQ ID NO: 37963 - DNA, 41 bp, Emericella nidulans
gttctcgagacgagcgatcgcgctgcgcccacattgccttt

SEQ ID NO: 37964 - DNA, 41 bp, Emericella nidulans
gaattcactgcggccgccatggcaacagcgtccggagccac

SEQ ID NO: 37965 - DNA, 42 bp, Emericella nidulans
gttctcgagacgagcgatcgccatcagacgcgggttcgttcg

SEQ ID NO: 37966 - DNA, 44 bp, Emericella nidulans
gaattcactgcggccgccatgagcaagaccagcttgatgcattg

SEQ ID NO: 37967 - DNA, 46 bp, Emericella nidulans
gttctcgagacgagcgatcgcggttgtatagggagccggaacgaca

SEQ ID NO: 37968 - DNA, 49 bp, Emericella nidulans
gaattcactgcggccgccatgttgtctcagtgcaaacttctttctctcg

SEQ ID NO: 37969 - DNA, 49 bp, Emericella nidulans
gttctcgagacgagcgatcgctcaggttgtccaatttagtcttggcatc

SEQ ID NO: 37970 - DNA, 45 bp, Emericella nidulans
gaattcactgcggccgccatgatgtcccttctcaaggctatatca

SEQ ID NO: 37971 - DNA, 41 bp, Emericella nidulans
gttctcgagacgagcgatcgcttcactccttgagcagtccc

SEQ ID NO: 37972 - DNA, 40 bp, Emericella nidulans
gaattcactgcggccgccatgccgaaggctgtatggtgtg

SEQ ID NO: 37973 - DNA, 41 bp, Emericella nidulans
gttctcgagacgagcgatcgcctctttcccaatcggctcag

SEQ ID NO: 37974 - DNA, 49 bp, Emericella nidulans
gaattcactgcggccgccatgtgcgattcacagctctgcttatcggtct

SEQ ID NO: 37975 - DNA, 43 bp, Emericella nidulans
gttctcgagacgagcgatcgccatacccttcctggccccttgg

SEQ ID NO: 37976 - DNA, 41 bp, Emericella nidulans
gaattcactgcggccgccatgccggcctacatccgcgagac

SEQ ID NO: 37977 - DNA, 49 bp, Emericella nidulans
gttctcgagacgagcgatcgccacttgtggctgagtagagtcccgagcc

SEQ ID NO: 37978 - DNA, 49 bp, Emericella nidulans
gaattcactgcggccgccatgttgtctctgtccagcatttctcttctgg

SEQ ID NO: 37979 - DNA, 41 bp, Emericella nidulans
gttctcgagacgagcgatcgcccgcggggttgagcggtaat

SEQ ID NO: 37980 - DNA, 44 bp, Emericella nidulans
gaattcactgcggccgccatgaatcgtaagcgacgaatcccagt

SEQ ID NO: 37981 - DNA, 43 bp, Emericella nidulans
gttctcgagacgagcgatcgccgctcagcgttgaattttctgc

SEQ ID NO: 37982 - DNA, 43 bp, Emericella nidulans
gaattcactgcggccgccatgcattcgcatcaaggccaagtcc

SEQ ID NO: 37983 - DNA, 46 bp, Emericella nidulans
gttctcgagacgagcgatcgccaagatgcaacactggggacgttct

SEQ ID NO: 37984 - DNA, 48 bp, Emericella nidulans
gaattcactgcggccgccatgctgtatgtttcattctcctgctctgct

SEQ ID NO: 37985 - DNA, 48 bp, Emericella nidulans
gttctcgagacgagcgatcgcaatctaggctccgttgatctcggcaac

SEQ ID NO: 37986 - DNA, 39 bp, Emericella nidulans
gaattcactgcggccgccatgcgtgcaggcatttctcct

SEQ ID NO: 37987 - DNA, 41 bp, Emericella nidulans
gttctcgagacgagcgatcgccgcccagacgttgtattctt

SEQ ID NO: 37988 - DNA, 41 bp, Emericella nidulans
gaattcactgcggccgccatgaacgcaggcccagcgcaaag

SEQ ID NO: 37989 - DNA, 49 bp, Emericella nidulans
gttctcgagacgagcgatcgctagcagtttctcattagtggctcggagg

SEQ ID NO: 37990 - DNA, 42 bp, Emericella nidulans
gaattcactgcggccgccatgcaggagcggtggttccgatga

SEQ ID NO: 37991 - DNA, 49 bp, Emericella nidulans
gttctcgagacgagcgatcgcgttttctctgtatcagggttggggcaag

SEQ ID NO: 37992 - DNA, 41 bp, Emericella nidulans
gaattcactgcggccgccatgcaaggcagtccgggcgattg

SEQ ID NO: 37993 - DNA, 49 bp, Emericella nidulans
gttctcgagacgagcgatcgcgtaacggggtttaggcttagaggtggtg

SEQ ID NO: 37994 - DNA, 40 bp, Emericella nidulans
gaattcactgcggccgccatggagcgcgcgataactgtat

SEQ ID NO: 37995 - DNA, 41 bp, Emericella nidulans
gttctcgagacgagcgatcgcatgtgcaaaacagcgtcatc

SEQ ID NO: 37996 - DNA, 45 bp, Emericella nidulans
gaattcactgcggccgccatgtggaagatgagcgtgaagaaaccc

SEQ ID NO: 37997 - DNA, 46 bp, Emericella nidulans
gttctcgagacgagcgatcgcttcatcgtcgtcaaatccatggtaa

SEQ ID NO: 37998 - DNA, 42 bp, Emericella nidulans
gaattcactgcggccgccatgtgaacagcgtgcgtgtgagca

SEQ ID NO: 37999 - DNA, 45 bp, Emericella nidulans
gttctcgagacgagcgatcgctaccggtgtcaggaaggactcagc

SEQ ID NO: 38000 - DNA, 41 bp, Emericella nidulans
gaattcactgcggccgccatgctccggagcatctggccacc

SEQ ID NO: 38001 - DNA, 41 bp, Emericella nidulans
gttctcgagacgagcgatcgcgcgccgagcagattgccaac

SEQ ID NO: 38002 - DNA, 41 bp, Emericella nidulans
gaattcactgcggccgccatgttctggctggcggtggcttt

SEQ ID NO: 38003 - DNA, 49 bp, Emericella nidulans
gttctcgagacgagcgatcgcctcgttctccttttcttccagacccttg

SEQ ID NO: 38004 - DNA, 44 bp, Emericella nidulans
gaattcactgcggccgccatgaccctgctgagacgcgttatctt

SEQ ID NO: 38005 - DNA, 47 bp, Emericella nidulans
gttctcgagacgagcgatcgcacaatcccggaattgctaagtgtggc

SEQ ID NO: 38006 - DNA, 49 bp, Emericella nidulans
gaattcactgcggccgccatgttggctgatattatgagaaacgataggc

SEQ ID NO: 38007 - DNA, 42 bp, Emericella nidulans
gttctcgagacgagcgatcgcgcacatgccccagaatcgaga

SEQ ID NO: 38008 - DNA, 41 bp, Emericella nidulans
gaattcactgcggccgccatgcgaaatcccccattacattg

SEQ ID NO: 38009 - DNA, 41 bp, Emericella nidulans
gttctcgagacgagcgatcgccgcccatttattcctcctgt

SEQ ID NO: 38010 - DNA, 40 bp, Emericella nidulans
gaattcactgcggccgccatggcgcgggcgtagcagttgg

SEQ ID NO: 38011 - DNA, 45 bp, Emericella nidulans
gttctcgagacgagcgatcgcgtagagcattgaggcgcgcaggga

SEQ ID NO: 38012 - DNA, 41 bp, Emericella nidulans
gaattcactgcggccgccatggcttgccgcgatgcttttca

SEQ ID NO: 38013 - DNA, 42 bp, Emericella nidulans
gttctcgagacgagcgatcgcggctcgacctcccaagatccc

SEQ ID NO: 38014 - DNA, 48 bp, Emericella nidulans
gaattcactgcggccgccatgccagaacgcaagtggacagtacttacg

SEQ ID NO: 38015 - DNA, 46 bp, Emericella nidulans
gttctcgagacgagcgatcgccttagttctcgagggcaaggggagg

SEQ ID NO: 38016 - DNA, 41 bp, Emericella nidulans
gaattcactgcggccgccatgcgtcttgaggatgcattagc

SEQ ID NO: 38017 - DNA, 41 bp, Emericella nidulans
gttctcgagacgagcgatcgcttatactcacccgatgaggg

SEQ ID NO: 38018 - DNA, 40 bp, Emericella nidulans
gaattcactgcggccgccatgctggctgactgaagccaag

SEQ ID NO: 38019 - DNA, 39 bp, Emericella nidulans
gttctcgagacgagcgatcgcgatctcgctggggagctg

SEQ ID NO: 38020 - DNA, 46 bp, Emericella nidulans
gaattcactgcggccgccatgatcatgggccataaggctcgtgtgc

SEQ ID NO: 38021 - DNA, 49 bp, Emericella nidulans
gttctcgagacgagcgatcgcggagatcatcaataccgcaagtgaaagc

SEQ ID NO: 38022 - DNA, 48 bp, Emericella nidulans
gaattcactgcggccgccatgctccgatgacactgaaataggcggtgg

SEQ ID NO: 38023 - DNA, 41 bp, Emericella nidulans
gttctcgagacgagcgatcgcttgcgatgacggcctgcgta

SEQ ID NO: 38024 - DNA, 42 bp, Emericella nidulans
gaattcactgcggccgccatgttcggattaccacgagatagc

SEQ ID NO: 38025 - DNA, 46 bp, Emericella nidulans
gttctcgagacgagcgatcgctctggtagagtcagtgttgtcatgt

SEQ ID NO: 38026 - DNA, 41 bp, Emericella nidulans
gaattcactgcggccgccatgcctcgaccaaacgataatcc

SEQ ID NO: 38027 - DNA, 41 bp, Emericella nidulans
gttctcgagacgagcgatcgcaatctcgcgactcgttcaag

SEQ ID NO: 38028 - DNA, 42 bp, Emericella nidulans
gaattcactgcggccgccatgattttcgcaagcgcttatacc

SEQ ID NO: 38029 - DNA, 41 bp, Emericella nidulans
gttctcgagacgagcgatcgcacctcctcatcacggtcatc

SEQ ID NO: 38030 - DNA, 41 bp, Emericella nidulans
gaattcactgcggccgccatgccctggctgcccgacctctt

SEQ ID NO: 38031 - DNA, 41 bp, Emericella nidulans
gttctcgagacgagcgatcgctcgcagcaccgctctcgtct

SEQ ID NO: 38032 - DNA, 41 bp, Emericella nidulans
gaattcactgcggccgccatggggcggtctactttgtgtct

SEQ ID NO: 38033 - DNA, 41 bp, Emericella nidulans
gttctcgagacgagcgatcgccccacagggacagtacaagg

SEQ ID NO: 38034 - DNA, 48 bp, Emericella nidulans
gaattcactgcggccgccatgaagcccgagaacttcaaagtcttgtca

SEQ ID NO: 38035 - DNA, 49 bp, Emericella nidulans
gttctcgagacgagcgatcgcgaagctagaaggtccaaaattagccaca

SEQ ID NO: 38036 - DNA, 47 bp, Emericella nidulans
gaattcactgcggccgccatgacggaatactctgctattccgactcc

SEQ ID NO: 38037 - DNA, 41 bp, Emericella nidulans
gttctcgagacgagcgatcgccgccaaggcgagcgacattc

SEQ ID NO: 38038 - DNA, 41 bp, Emericella nidulans
gaattcactgcggccgccatgacccggctccacaacaccgt

SEQ ID NO: 38039 - DNA, 41 bp, Emericella nidulans
gttctcgagacgagcgatcgcgaccggattgctgcggtcgt

SEQ ID NO: 38040 - DNA, 49 bp, Emericella nidulans
gaattcactgcggccgccatgctccttagtcagtctatccagccattcc

SEQ ID NO: 38041 - DNA, 49 bp, Emericella nidulans
gttctcgagacgagcgatcgcagagtttttaagtgaccatctgcgtggg

SEQ ID NO: 38042 - DNA, 43 bp, Emericella nidulans
gaattcactgcggccgccatgccttcagaaccagcaccgacca

SEQ ID NO: 38043 - DNA, 48 bp, Emericella nidulans
gttctcgagacgagcgatcgccgcagatagtatgaccatgtagcctgt

SEQ ID NO: 38044 - DNA, 41 bp, Emericella nidulans
gaattcactgcggccgccatgatgccgcggcgaatgagaac

SEQ ID NO: 38045 - DNA, 42 bp, Emericella nidulans
gttctcgagacgagcgatcgctggtgtcatgggcgtcattgg

SEQ ID NO: 38046 - DNA, 41 bp, Emericella nidulans
gaattcactgcggccgccatgacaaataccgctgcttgctt

SEQ ID NO: 38047 - DNA, 40 bp, Emericella nidulans
gttctcgagacgagcgatcgccaaggttgggagggagagt

SEQ ID NO: 38048 - DNA, 41 bp, Emericella nidulans
gaattcactgcggccgccatgtctcaaggccgtcgaatatc

SEQ ID NO: 38049 - DNA, 40 bp, Emericella nidulans
gttctcgagacgagcgatcgctctgccaccaagtccatgt

SEQ ID NO: 38050 - DNA, 39 bp, Emericella nidulans
gaattcactgcggccgccatgggcaagattcatgtccaa

SEQ ID NO: 38051 - DNA, 43 bp, Emericella nidulans
gttctcgagacgagcgatcgcaagctcgggatgaagtttgata

SEQ ID NO: 38052 - DNA, 41 bp, Emericella nidulans
gaattcactgcggccgccatggagctctggtgcgggcagga

SEQ ID NO: 38053 - DNA, 44 bp, Emericella nidulans
gttctcgagacgagcgatcgccgaccagccggactctttaatgg

SEQ ID NO: 38054 - DNA, 45 bp, Emericella nidulans
gaattcactgcggccgccatggttaggtttgactcggatcgtggc

SEQ ID NO: 38055 - DNA, 49 bp, Emericella nidulans
gttctcgagacgagcgatcgctcatacccgaactacaattcgccttacc

SEQ ID NO: 38056 - DNA, 42 bp, Emericella nidulans
gaattcactgcggccgccatgtcgtccgacatccgtcatccc

SEQ ID NO: 38057 - DNA, 49 bp, Emericella nidulans
gttctcgagacgagcgatcgcatgtgagtcatagtaaagcgcaaggatt

SEQ ID NO: 38058 - DNA, 40 bp, Emericella nidulans
gaattcactgcggccgccatgatcgagagcgtgttgacat

SEQ ID NO: 38059 - DNA, 44 bp, Emericella nidulans
gttctcgagacgagcgatcgcaagcagaatctcttctaaagcaa

SEQ ID NO: 38060 - DNA, 41 bp, Emericella nidulans
gaattcactgcggccgccatggcatcatccttctccatgct

SEQ ID NO: 38061 - DNA, 41 bp, Emericella nidulans
gttctcgagacgagcgatcgcacgttgcccgtagtgatacc

SEQ ID NO: 38062 - DNA, 46 bp, Emericella nidulans
gaattcactgcggccgccatgcgaatggtggtaccaaggggcgtta

SEQ ID NO: 38063 - DNA, 49 bp, Emericella nidulans
gttctcgagacgagcgatcgcgcaagaagttcagctcacgacactacga

SEQ ID NO: 38064 - DNA, 47 bp, Emericella nidulans
gaattcactgcggccgccatgcgaggcaataccggtcttagcaattt

SEQ ID NO: 38065 - DNA, 48 bp, Emericella nidulans
gttctcgagacgagcgatcgcagccgctcaggatcagagcctgctttc

SEQ ID NO: 38066 - DNA, 46 bp, Emericella nidulans
gaattcactgcggccgccatgcagatcatcatgcgactgtttcacc

SEQ ID NO: 38067 - DNA, 41 bp, Emericella nidulans
gttctcgagacgagcgatcgcacagttgcggccagggcatc

SEQ ID NO: 38068 - DNA, 49 bp, Emericella nidulans
gaattcactgcggccgccatggtgcatacctcatcctcagctggccctc

SEQ ID NO: 38069 - DNA, 45 bp, Emericella nidulans
gttctcgagacgagcgatcgccaatcccgagcatgtcagtgttgc

SEQ ID NO: 38070 - DNA, 41 bp, Emericella nidulans
gaattcactgcggccgccatgcgccaacggagggctgattg

SEQ ID NO: 38071 - DNA, 42 bp, Emericella nidulans
gttctcgagacgagcgatcgcgcggtccaaaatccgcttcca

SEQ ID NO: 38072 - DNA, 42 bp, Emericella nidulans
gaattcactgcggccgccatgtgcagggctctggagctggac

SEQ ID NO: 38073 - DNA, 46 bp, Emericella nidulans
gttctcgagacgagcgatcgctgctaaataactgcgctcccatccc

SEQ ID NO: 38074 - DNA, 44 bp, Emericella nidulans
gaattcactgcggccgccatgattccaacaagcaccgtgtgcaa

SEQ ID NO: 38075 - DNA, 41 bp, Emericella nidulans
gttctcgagacgagcgatcgccatccgcgcgcacttggttt

SEQ ID NO: 38076 - DNA, 45 bp, Emericella nidulans
gaattcactgcggccgccatgcccgcaagatgcatatcaaagaga

SEQ ID NO: 38077 - DNA, 45 bp, Emericella nidulans
gttctcgagacgagcgatcgccttcaccaagtccttcgcataccg

SEQ ID NO: 38078 - DNA, 40 bp, Emericella nidulans
gaattcactgcggccgccatgccagctcgctttcaaacaa

SEQ ID NO: 38079 - DNA, 41 bp, Emericella nidulans
gttctcgagacgagcgatcgctcacgaaatttccatgctca

SEQ ID NO: 38080 - DNA, 43 bp, Emericella nidulans
gaattcactgcggccgccatgtgggggacagaagcagcggttg

SEQ ID NO: 38081 - DNA, 45 bp, Emericella nidulans
gttctcgagacgagcgatcgctgtgatggtgattgcgtacattcg

SEQ ID NO: 38082 - DNA, 41 bp, Emericella nidulans
gaattcactgcggccgccatgccccatcgatactgcaaaaa

SEQ ID NO: 38083 - DNA, 41 bp, Emericella nidulans
gttctcgagacgagcgatcgctagcctcaggtcaccacctc

SEQ ID NO: 38084 - DNA, 42 bp, Emericella nidulans
gaattcactgcggccgccatgcgaacacagtgacccccttcg

SEQ ID NO: 38085 - DNA, 45 bp, Emericella nidulans
gttctcgagacgagcgatcgccttcactttcccatcccccacacc

SEQ ID NO: 38086 - DNA, 49 bp, Emericella nidulans
gaattcactgcggccgccatgtgatcagtggtaagactcttccttgctt

SEQ ID NO: 38087 - DNA, 48 bp, Emericella nidulans
gttctcgagacgagcgatcgcaccgattgactgtccagccataattcc

SEQ ID NO: 38088 - DNA, 43 bp, Emericella nidulans
gaattcactgcggccgccatgccaccactcttctctctactgg

SEQ ID NO: 38089 - DNA, 41 bp, Emericella nidulans
gttctcgagacgagcgatcgcgggtgcagggttgtattgtt

SEQ ID NO: 38090 - DNA, 48 bp, Emericella nidulans
gaattcactgcggccgccatgatggaatctgcgtcaaagtaccagatg

SEQ ID NO: 38091 - DNA, 44 bp, Emericella nidulans
gttctcgagacgagcgatcgcagacttctcgtggctggcgaatc

SEQ ID NO: 38092 - DNA, 41 bp, Emericella nidulans
gaattcactgcggccgccatgctgttgcacccagtttcaga

SEQ ID NO: 38093 - DNA, 44 bp, Emericella nidulans
gttctcgagacgagcgatcgccaaatattaccgaggcactaaaa

SEQ ID NO: 38094 - DNA, 41 bp, Emericella nidulans
gaattcactgcggccgccatgtatcaaccgtatccccaacg

SEQ ID NO: 38095 - DNA, 44 bp, Emericella nidulans
gttctcgagacgagcgatcgccctgcctatattcatcaatgagc

SEQ ID NO: 38096 - DNA, 40 bp, Emericella nidulans
gaattcactgcggccgccatgggtctagccggcattccta

SEQ ID NO: 38097 - DNA, 41 bp, Emericella nidulans
gttctcgagacgagcgatcgccctcgaccgttgttcagttt

SEQ ID NO: 38098 - DNA, 43 bp, Emericella nidulans
gaattcactgcggccgccatgcaagcacgaatgtccgctacga

SEQ ID NO: 38099 - DNA, 41 bp, Emericella nidulans
gttctcgagacgagcgatcgcgggcccggcgccgataagtt

SEQ ID NO: 38100 - DNA, 47 bp, Emericella nidulans
gaattcactgcggccgccatgacgaaagaaatacaatattcgcaatg

SEQ ID NO: 38101 - DNA, 43 bp, Emericella nidulans
gttctcgagacgagcgatcgccacacagccagtagaccatacg

SEQ ID NO: 38102 - DNA, 41 bp, Emericella nidulans
gaattcactgcggccgccatgaactcgggattgcatgtctc

SEQ ID NO: 38103 - DNA, 41 bp, Emericella nidulans
gttctcgagacgagcgatcgcagcccttttcaatcacgaaa

SEQ ID NO: 38104 - DNA, 49 bp, Emericella nidulans
gaattcactgcggccgccatgcagttgtctgtgtctcttcggtcggcac

SEQ ID NO: 38105 - DNA, 43 bp, Emericella nidulans
gttctcgagacgagcgatcgctcaagccaggcagcatagatgg

SEQ ID NO: 38106 - DNA, 41 bp, Emericella nidulans
gaattcactgcggccgccatggcgctccctgaacgtctcca

SEQ ID NO: 38107 - DNA, 44 bp, Emericella nidulans
gttctcgagacgagcgatcgcacacgggaccggataatagacca

SEQ ID NO: 38108 - DNA, 41 bp, Emericella nidulans
gaattcactgcggccgccatggcgccggggacagagacaag

SEQ ID NO: 38109 - DNA, 41 bp, Emericella nidulans
gttctcgagacgagcgatcgcgccgcccaagtcgagcgtta

SEQ ID NO: 38110 - DNA, 47 bp, Emericella nidulans
gaattcactgcggccgccatggtcattactttcaagaatgtctttgt

SEQ ID NO: 38111 - DNA, 40 bp, Emericella nidulans
gttctcgagacgagcgatcgcaccccacggttgagatgat

SEQ ID NO: 38112 - DNA, 41 bp, Emericella nidulans
gaattcactgcggccgccatgcgtcctccacggcgcaaaag

SEQ ID NO: 38113 - DNA, 41 bp, Emericella nidulans
gttctcgagacgagcgatcgcacgagcgcaccaccagcgta

SEQ ID NO: 38114 - DNA, 44 bp, Emericella nidulans
gaattcactgcggccgccatggggattcgtcgtgcaatcagggt

SEQ ID NO: 38115 - DNA, 49 bp, Emericella nidulans
gttctcgagacgagcgatcgcaagtgatcgttcattagaacagcaatcc

SEQ ID NO: 38116 - DNA, 41 bp, Emericella nidulans
gaattcactgcggccgccatgccccggcaaggtgttgctca

SEQ ID NO: 38117 - DNA, 46 bp, Emericella nidulans
gttctcgagacgagcgatcgcagaatctgcggtagaggcaagagcc

SEQ ID NO: 38118 - DNA, 40 bp, Emericella nidulans
gaattcactgcggccgccatgcgaatgcagttccgattct

SEQ ID NO: 38119 - DNA, 41 bp, Emericella nidulans
gttctcgagacgagcgatcgctcccgaagttctctggactg

SEQ ID NO: 38120 - DNA, 41 bp, Emericella nidulans
gaattcactgcggccgccatgaaccgtcccaagggatccaa

SEQ ID NO: 38121 - DNA, 46 bp, Emericella nidulans
gttctcgagacgagcgatcgcgcagagaagacctgtctttccaagg

SEQ ID NO: 38122 - DNA, 43 bp, Emericella nidulans
gaattcactgcggccgccatgtacaagttgcaaaccgcgccta

SEQ ID NO: 38123 - DNA, 49 bp, Emericella nidulans
gttctcgagacgagcgatcgcgtgaagtgttgacttgttgaaattctgc

SEQ ID NO: 38124 - DNA, 41 bp, Emericella nidulans
gaattcactgcggccgccatgtcgactaccaacgacatcca

SEQ ID NO: 38125 - DNA, 42 bp, Emericella nidulans
gttctcgagacgagcgatcgcccctgagttgctcaacaccta

SEQ ID NO: 38126 - DNA, 49 bp, Emericella nidulans
gaattcactgcggccgccatgttgatgagtctactcagtctgctgaacc

SEQ ID NO: 38127 - DNA, 43 bp, Emericella nidulans
gttctcgagacgagcgatcgcaggacggctgaactggatgaga

SEQ ID NO: 38128 - DNA, 44 bp, Emericella nidulans
gaattcactgcggccgccatgcccatgtagctcagaatccaacg

SEQ ID NO: 38129 - DNA, 41 bp, Emericella nidulans
gttctcgagacgagcgatcgcaagccttgcccggacgaaca

SEQ ID NO: 38130 - DNA, 49 bp, Emericella nidulans
gaattcactgcggccgccatgtcatatgtgtcctaaccccaggatctac

SEQ ID NO: 38131 - DNA, 45 bp, Emericella nidulans
gttctcgagacgagcgatcgccggcagggattcatcaataacagg

SEQ ID NO: 38132 - DNA, 41 bp, Emericella nidulans
gaattcactgcggccgccatggcggctgaggaggccttcaa

SEQ ID NO: 38133 - DNA, 41 bp, Emericella nidulans
gttctcgagacgagcgatcgccctggggcgctacgctcttg

SEQ ID NO: 38134 - DNA, 48 bp, Emericella nidulans
gaattcactgcggccgccatgtctatatcctcgagcggtacggcgagt

SEQ ID NO: 38135 - DNA, 46 bp, Emericella nidulans
gttctcgagacgagcgatcgccgtataccatgtaggagtcgggtgc

SEQ ID NO: 38136 - DNA, 49 bp, Emericella nidulans
gaattcactgcggccgccatggtattggtctttcgacaagaaggctccc

SEQ ID NO: 38137 - DNA, 48 bp, Emericella nidulans
gttctcgagacgagcgatcgcgcaaccacgtaagtactgaatcacggt

SEQ ID NO: 38138 - DNA, 42 bp, Emericella nidulans
gaattcactgcggccgccatgcaacaaacttgcatttgctca

SEQ ID NO: 38139 - DNA, 41 bp, Emericella nidulans
gttctcgagacgagcgatcgctagtgtccttggtcggtgtg

SEQ ID NO: 38140 - DNA, 41 bp, Emericella nidulans
gaattcactgcggccgccatgccggtcaacgcaagcccaac

SEQ ID NO: 38141 - DNA, 41 bp, Emericella nidulans
gttctcgagacgagcgatcgcgaatccgacgggcccttgct

SEQ ID NO: 38142 - DNA, 44 bp, Emericella nidulans
gaattcactgcggccgccatgattattctgagattcgagagtcg

SEQ ID NO: 38143 - DNA, 49 bp, Emericella nidulans
gttctcgagacgagcgatcgcttactctatagtatggctcactgagagg

SEQ ID NO: 38144 - DNA, 42 bp, Emericella nidulans
gaattcactgcggccgccatgtcaccatttctttgcatgtga

SEQ ID NO: 38145 - DNA, 41 bp, Emericella nidulans
gttctcgagacgagcgatcgcagaggatcccaccaatcaat

SEQ ID NO: 38146 - DNA, 41 bp, Emericella nidulans
gaattcactgcggccgccatgtcaacccgacgaggacacca

SEQ ID NO: 38147 - DNA, 42 bp, Emericella nidulans
gttctcgagacgagcgatcgcgccttcttccccaccaacgtc

SEQ ID NO: 38148 - DNA, 42 bp, Emericella nidulans
gaattcactgcggccgccatgtgacaggtgcagatactgtga

SEQ ID NO: 38149 - DNA, 46 bp, Emericella nidulans
gttctcgagacgagcgatcgcttcatagtagacaagaacgagtcca

SEQ ID NO: 38150 - DNA, 41 bp, Emericella nidulans
gaattcactgcggccgccatgatcgactacatcgccctgac

SEQ ID NO: 38151 - DNA, 43 bp, Emericella nidulans
gttctcgagacgagcgatcgcttcctgagtagagccagtagca

SEQ ID NO: 38152 - DNA, 41 bp, Emericella nidulans
gaattcactgcggccgccatgcgcgtgggtctgtgggagat

SEQ ID NO: 38153 - DNA, 41 bp, Emericella nidulans
gttctcgagacgagcgatcgccttcggcgcgctctttctcg

SEQ ID NO: 38154 - DNA, 48 bp, Emericella nidulans
gaattcactgcggccgccatgtgaaaatcgcatcaaccatgtctctcc

SEQ ID NO: 38155 - DNA, 46 bp, Emericella nidulans
gttctcgagacgagcgatcgcgggggactcgctttcaataagaacc

SEQ ID NO: 38156 - DNA, 41 bp, Emericella nidulans
gaattcactgcggccgccatgctgcccggtctgtgctctca

SEQ ID NO: 38157 - DNA, 42 bp, Emericella nidulans
gttctcgagacgagcgatcgcggcccttgtttgtcgccgtgt

SEQ ID NO: 38158 - DNA, 41 bp, Emericella nidulans
gaattcactgcggccgccatgggacaccgaaagagagcaag

SEQ ID NO: 38159 - DNA, 41 bp, Emericella nidulans
gttctcgagacgagcgatcgcaaggtgtagggcctgtgatg

SEQ ID NO: 38160 - DNA, 40 bp, Emericella nidulans
gaattcactgcggccgccatgaccagcagctgatcaggga

SEQ ID NO: 38161 - DNA, 41 bp, Emericella nidulans
gttctcgagacgagcgatcgcgggattggaaacattgttgg

SEQ ID NO: 38162 - DNA, 42 bp, Emericella nidulans
gaattcactgcggccgccatgcaagttggctcagctttgtct

SEQ ID NO: 38163 - DNA, 42 bp, Emericella nidulans
gttctcgagacgagcgatcgccattactcgctcccagctgta

SEQ ID NO: 38164 - DNA, 43 bp, Emericella nidulans
gaattcactgcggccgccatgtgaggacgatctgaaagagttg

SEQ ID NO: 38165 - DNA, 41 bp, Emericella nidulans
gttctcgagacgagcgatcgctttttctctgcggactgctt

SEQ ID NO: 38166 - DNA, 49 bp, Emericella nidulans
gaattcactgcggccgccatgggtgaagatataatgcaggtagctcgaa

SEQ ID NO: 38167 - DNA, 48 bp, Emericella nidulans
gttctcgagacgagcgatcgcaatgatcctttgacaagagcccagtga

SEQ ID NO: 38168 - DNA, 49 bp, Emericella nidulans
gaattcactgcggccgccatgtagacactttgccaaactccttcccaac

SEQ ID NO: 38169 - DNA, 41 bp, Emericella nidulans
gttctcgagacgagcgatcgcggtgttcgttgctgcggaga

SEQ ID NO: 38170 - DNA, 41 bp, Emericella nidulans
gaattcactgcggccgccatgccccgagaacaacccgtcca

SEQ ID NO: 38171 - DNA, 42 bp, Emericella nidulans
gttctcgagacgagcgatcgccggggttgtgcaaattcgtga

SEQ ID NO: 38172 - DNA, 46 bp, Emericella nidulans
gaattcactgcggccgccatgttatcacagaccagttaaccaaagg

SEQ ID NO: 38173 - DNA, 44 bp, Emericella nidulans
gttctcgagacgagcgatcgcctatgtattctttctcgccgttc

SEQ ID NO: 38174 - DNA, 45 bp, Emericella nidulans
gaattcactgcggccgccatgatcactttcttcattgctatttca

SEQ ID NO: 38175 - DNA, 41 bp, Emericella nidulans
gttctcgagacgagcgatcgcgctgatcccgctcatattgt

SEQ ID NO: 38176 - DNA, 49 bp, Emericella nidulans
gaattcactgcggccgccatgaaggaagagaatgggtatgggggcgatt

SEQ ID NO: 38177 - DNA, 45 bp, Emericella nidulans
gttctcgagacgagcgatcgcactttgcttgcactcagccgcttc

SEQ ID NO: 38178 - DNA, 43 bp, Emericella nidulans
gaattcactgcggccgccatgcaccggtatcgccactgctttc

SEQ ID NO: 38179 - DNA, 48 bp, Emericella nidulans
gttctcgagacgagcgatcgcttaccaccaggaagaaggtccagtaga

SEQ ID NO: 38180 - DNA, 43 bp, Emericella nidulans
gaattcactgcggccgccatgcggtgctgagaaccggcatttc

SEQ ID NO: 38181 - DNA, 49 bp, Emericella nidulans
gttctcgagacgagcgatcgcagaggataccgaaacgacttattctccc

SEQ ID NO: 38182 - DNA, 41 bp, Emericella nidulans
gaattcactgcggccgccatgcgaggcatacggcgctcctc

SEQ ID NO: 38183 - DNA, 41 bp, Emericella nidulans
gttctcgagacgagcgatcgcctgaaccgccggcaacgaag

SEQ ID NO: 38184 - DNA, 41 bp, Emericella nidulans
gaattcactgcggccgccatgccgaggaggatatgggtctt

SEQ ID NO: 38185 - DNA, 41 bp, Emericella nidulans
gttctcgagacgagcgatcgcgaaaaaccggtggtagttgc

SEQ ID NO: 38186 - DNA, 45 bp, Emericella nidulans
gaattcactgcggccgccatgcaactggaattcaagtacctagcc

SEQ ID NO: 38187 - DNA, 42 bp, Emericella nidulans
gttctcgagacgagcgatcgctgaatttgagtctgcgagagg

SEQ ID NO: 38188 - DNA, 45 bp, Emericella nidulans
gaattcactgcggccgccatgtccgctttgtgcttgaagacactc

SEQ ID NO: 38189 - DNA, 45 bp, Emericella nidulans
gttctcgagacgagcgatcgcgaccttgtgctcacgaatgaatgg

SEQ ID NO: 38190 - DNA, 41 bp, Emericella nidulans
gaattcactgcggccgccatgatcctcccgggctggcactc

SEQ ID NO: 38191 - DNA, 45 bp, Emericella nidulans
gttctcgagacgagcgatcgctcccttcccatcgggtagttcacc

SEQ ID NO: 38192 - DNA, 49 bp, Emericella nidulans
gaattcactgcggccgccatgaagggcttttagcacagatctgcctctc

SEQ ID NO: 38193 - DNA, 49 bp, Emericella nidulans
gttctcgagacgagcgatcgcattaatagaccgtagctccaaaaggtgc

SEQ ID NO: 38194 - DNA, 41 bp, Emericella nidulans
gaattcactgcggccgccatgcgagccccggacagagcatc

SEQ ID NO: 38195 - DNA, 49 bp, Emericella nidulans
gttctcgagacgagcgatcgctacagatacttcaacgtctctgccatcc

SEQ ID NO: 38196 - DNA, 41 bp, Emericella nidulans
gaattcactgcggccgccatgggacagcggagagcgcgaag

SEQ ID NO: 38197 - DNA, 45 bp, Emericella nidulans
gttctcgagacgagcgatcgccgtttcttttcaacctccgtagcc

SEQ ID NO: 38198 - DNA, 42 bp, Emericella nidulans
gaattcactgcggccgccatgaggaattcctgctactgatgc

SEQ ID NO: 38199 - DNA, 41 bp, Emericella nidulans
gttctcgagacgagcgatcgcggcgatatgagagacggatt

SEQ ID NO: 38200 - DNA, 41 bp, Emericella nidulans
gaattcactgcggccgccatggctattttacggctcaccca

SEQ ID NO: 38201 - DNA, 41 bp, Emericella nidulans
gttctcgagacgagcgatcgcacatctgtaacccgcgacat

SEQ ID NO: 38202 - DNA, 49 bp, Emericella nidulans
gaattcactgcggccgccatgcacgttcaagaccgccgccggtatattt

SEQ ID NO: 38203 - DNA, 44 bp, Emericella nidulans
gttctcgagacgagcgatcgcttgcacgcgaagacaacataagg

SEQ ID NO: 38204 - DNA, 41 bp, Emericella nidulans
gaattcactgcggccgccatggctctcggtacacgggtaaa

SEQ ID NO: 38205 - DNA, 41 bp, Emericella nidulans
gttctcgagacgagcgatcgcaagtactcccgtcgaggacc

SEQ ID NO: 38206 - DNA, 46 bp, Emericella nidulans
gaattcactgcggccgccatggatactgactccgtaatagcttctg

SEQ ID NO: 38207 - DNA, 41 bp, Emericella nidulans
gttctcgagacgagcgatcgcagcaggttcgcagtgtcttt

SEQ ID NO: 38208 - DNA, 43 bp, Emericella nidulans
gaattcactgcggccgccatgtatgcgcaaataagcgcgtcgt

SEQ ID NO: 38209 - DNA, 44 bp, Emericella nidulans
gttctcgagacgagcgatcgcgtgactcccactaggtcgctgtg

SEQ ID NO: 38210 - DNA, 47 bp, Emericella nidulans
gaattcactgcggccgccatgggtggtgaatgtagacgtcgcaaatg

SEQ ID NO: 38211 - DNA, 49 bp, Emericella nidulans
gttctcgagacgagcgatcgcatgatgattccttttgcacaagcctgga

SEQ ID NO: 38212 - DNA, 40 bp, Emericella nidulans
gaattcactgcggccgccatgcgaaaccctccacagacct

SEQ ID NO: 38213 - DNA, 41 bp, Emericella nidulans
gttctcgagacgagcgatcgcggacgaatttgacgcttgat

SEQ ID NO: 38214 - DNA, 45 bp, Emericella nidulans
gaattcactgcggccgccatgatggctaactacctcgcctccatt

SEQ ID NO: 38215 - DNA, 49 bp, Emericella nidulans
gttctcgagacgagcgatcgcaatccatcattcagtatcttcgccgtgt

SEQ ID NO: 38216 - DNA, 41 bp, Emericella nidulans
gaattcactgcggccgccatgggtctactggcagaagtggc

SEQ ID NO: 38217 - DNA, 48 bp, Emericella nidulans
gttctcgagacgagcgatcgcgtcttggtaatagacagtgtttttgaa

SEQ ID NO: 38218 - DNA, 39 bp, Emericella nidulans
gaattcactgcggccgccatgaggcgcttcgagcggtgc

SEQ ID NO: 38219 - DNA, 44 bp, Emericella nidulans
gttctcgagacgagcgatcgcgtcgcctcagtctcatctccacc

SEQ ID NO: 38220 - DNA, 40 bp, Emericella nidulans
gaattcactgcggccgccatgaagggaagcgctacgatgt

SEQ ID NO: 38221 - DNA, 41 bp, Emericella nidulans
gttctcgagacgagcgatcgcattcaaatcttccgcccata

SEQ ID NO: 38222 - DNA, 41 bp, Emericella nidulans
gaattcactgcggccgccatgtggattcggcgggagcaatc

SEQ ID NO: 38223 - DNA, 43 bp, Emericella nidulans
gttctcgagacgagcgatcgctcagaagcaccggctgcagaga

SEQ ID NO: 38224 - DNA, 46 bp, Emericella nidulans
gaattcactgcggccgccatgctggaggctgaggtcaaggagttca

SEQ ID NO: 38225 - DNA, 46 bp, Emericella nidulans
gttctcgagacgagcgatcgcggttgaggaactggggagtggtttg

SEQ ID NO: 38226 - DNA, 45 bp, Emericella nidulans
gaattcactgcggccgccatgccccattctcccttggaactttga

SEQ ID NO: 38227 - DNA, 49 bp, Emericella nidulans
gttctcgagacgagcgatcgcaatctccccttactgtcgacctttttcc

SEQ ID NO: 38228 - DNA, 41 bp, Emericella nidulans
gaattcactgcggccgccatgtgatggttgcgtgtattcgt

SEQ ID NO: 38229 - DNA, 43 bp, Emericella nidulans
gttctcgagacgagcgatcgctgactctttcaatgaagtcgag

SEQ ID NO: 38230 - DNA, 43 bp, Emericella nidulans
gaattcactgcggccgccatgtcgacgcgattacctcgcgatt

SEQ ID NO: 38231 - DNA, 42 bp, Emericella nidulans
gttctcgagacgagcgatcgcaccgcctcctcggaaaaagca

SEQ ID NO: 38232 - DNA, 43 bp, Emericella nidulans
gaattcactgcggccgccatgccacgcaaattctgtcgctgct

SEQ ID NO: 38233 - DNA, 46 bp, Emericella nidulans
gttctcgagacgagcgatcgctaagcaatatctcacggcgcgaatg

SEQ ID NO: 38234 - DNA, 49 bp, Emericella nidulans
gaattcactgcggccgccatggagttcttgtcttcgtgccttaaactcg

SEQ ID NO: 38235 - DNA, 45 bp, Emericella nidulans
gttctcgagacgagcgatcgcgatggaaccccaggtgaagagagc

SEQ ID NO: 38236 - DNA, 42 bp, Emericella nidulans
gaattcactgcggccgccatgctaaatggcatgacagagcta

SEQ ID NO: 38237 - DNA, 45 bp, Emericella nidulans
gttctcgagacgagcgatcgcaggagggtgatagagtagaattga

SEQ ID NO: 38238 - DNA, 49 bp, Emericella nidulans
gaattcactgcggccgccatggatgcatatgaaagactgcttctcgatg

SEQ ID NO: 38239 - DNA, 47 bp, Emericella nidulans
gttctcgagacgagcgatcgcagcttctccaagatctccccatctca

SEQ ID NO: 38240 - DNA, 48 bp, Emericella nidulans
gaattcactgcggccgccatgaggcaggatgaagatagatttcttgga

SEQ ID NO: 38241 - DNA, 44 bp, Emericella nidulans
gttctcgagacgagcgatcgcgaatctgcgtttcgcgcagacag

SEQ ID NO: 38242 - DNA, 39 bp, Emericella nidulans
gaattcactgcggccgccatggcagactcccccagggat

SEQ ID NO: 38243 - DNA, 48 bp, Emericella nidulans
gttctcgagacgagcgatcgctgtataatagagggagaggcagctcta

SEQ ID NO: 38244 - DNA, 41 bp, Emericella nidulans
gaattcactgcggccgccatgtggcgtacgggctgatgcaa

SEQ ID NO: 38245 - DNA, 49 bp, Emericella nidulans
gttctcgagacgagcgatcgcgaccttgctatccttggtgttacggagg

SEQ ID NO: 38246 - DNA, 45 bp, Emericella nidulans
gaattcactgcggccgccatggcttagccctctggagacgcttgc

SEQ ID NO: 38247 - DNA, 45 bp, Emericella nidulans
gttctcgagacgagcgatcgctagaccgcgtgataaacgcaaagg

SEQ ID NO: 38248 - DNA, 49 bp, Emericella nidulans
gaattcactgcggccgccatgtttttcagccgatcaagaaagtgtaagt

SEQ ID NO: 38249 - DNA, 41 bp, Emericella nidulans
gttctcgagacgagcgatcgcggcgccgtaaacgtcggaaa

SEQ ID NO: 38250 - DNA, 41 bp, Emericella nidulans
gaattcactgcggccgccatgcccgcacgcagaaagcaaca

SEQ ID NO: 38251 - DNA, 46 bp, Emericella nidulans
gttctcgagacgagcgatcgcgctttacgcaagagcgatgcactca

SEQ ID NO: 38252 - DNA, 41 bp, Emericella nidulans
gaattcactgcggccgccatgacgctgctgcgagttcaccc

SEQ ID NO: 38253 - DNA, 49 bp, Emericella nidulans
gttctcgagacgagcgatcgctggaggagtaaacataccgcagtaaaga

SEQ ID NO: 38254 - DNA, 47 bp, Emericella nidulans
gaattcactgcggccgccatgaaacgcatctgtgccagactgtatcc

SEQ ID NO: 38255 - DNA, 44 bp, Emericella nidulans
gttctcgagacgagcgatcgccgtgcacactagctccagcgaca

SEQ ID NO: 38256 - DNA, 41 bp, Emericella nidulans
gaattcactgcggccgccatggccgagagatgcaaaggaat

SEQ ID NO: 38257 - DNA, 41 bp, Emericella nidulans
gttctcgagacgagcgatcgcaactgtaggcccgaaggaat

SEQ ID NO: 38258 - DNA, 47 bp, Emericella nidulans
gaattcactgcggccgccatgtgagggctcagtattcggacattaca

SEQ ID NO: 38259 - DNA, 46 bp, Emericella nidulans
gttctcgagacgagcgatcgcgacatactgccaagtctgcccgaca

SEQ ID NO: 38260 - DNA, 41 bp, Emericella nidulans
gaattcactgcggccgccatgacgactttggtggcatgaat

SEQ ID NO: 38261 - DNA, 41 bp, Emericella nidulans
gttctcgagacgagcgatcgccaaagtcaatgtccgggatg

SEQ ID NO: 38262 - DNA, 49 bp, Emericella nidulans
gaattcactgcggccgccatgattgcgtttgctaacgctgcgctagttg

SEQ ID NO: 38263 - DNA, 47 bp, Emericella nidulans
gttctcgagacgagcgatcgcagcaattacgcatatcagatgcacag

SEQ ID NO: 38264 - DNA, 42 bp, Emericella nidulans
gaattcactgcggccgccatgtgtcctctgggacatgactct

SEQ ID NO: 38265 - DNA, 43 bp, Emericella nidulans
gttctcgagacgagcgatcgcgccagcttaatctaaaccgttc

SEQ ID NO: 38266 - DNA, 44 bp, Emericella nidulans
gaattcactgcggccgccatgggtatgatcaagcacactgtttc

SEQ ID NO: 38267 - DNA, 41 bp, Emericella nidulans
gttctcgagacgagcgatcgccgctcgaacgcagatgttac

SEQ ID NO: 38268 - DNA, 47 bp, Emericella nidulans
gaattcactgcggccgccatgcagccgttttaatgtaccaaggacca

SEQ ID NO: 38269 - DNA, 49 bp, Emericella nidulans
gttctcgagacgagcgatcgccaggttatcagtatccacccaccactcg

SEQ ID NO: 38270 - DNA, 43 bp, Emericella nidulans
gaattcactgcggccgccatgattgccaaaagcagacggcaca

SEQ ID NO: 38271 - DNA, 49 bp, Emericella nidulans
gttctcgagacgagcgatcgccacccaaaaatcttcaagaaaccccaga

SEQ ID NO: 38272 - DNA, 46 bp, Emericella nidulans
gaattcactgcggccgccatgaacaaacccggatacaacctcttcg

SEQ ID NO: 38273 - DNA, 41 bp, Emericella nidulans
gttctcgagacgagcgatcgcacaccgccggtaccctggag

SEQ ID NO: 38274 - DNA, 47 bp, Emericella nidulans
gaattcactgcggccgccatggacatgaccactttcgtatgcgtctg

SEQ ID NO: 38275 - DNA, 47 bp, Emericella nidulans
gttctcgagacgagcgatcgccgcttagtttggaggcacataagggt

SEQ ID NO: 38276 - DNA, 42 bp, Emericella nidulans
gaattcactgcggccgccatgtcgacgtctctgccgctctcc

SEQ ID NO: 38277 - DNA, 44 bp, Emericella nidulans
gttctcgagacgagcgatcgcgaagtccaaccctgtggcgtcgt

SEQ ID NO: 38278 - DNA, 40 bp, Emericella nidulans
gaattcactgcggccgccatggcaggttcttcgatcgcta

SEQ ID NO: 38279 - DNA, 49 bp, Emericella nidulans
gttctcgagacgagcgatcgcaaactatataaatggcaaaataacagaa

SEQ ID NO: 38280 - DNA, 41 bp, Emericella nidulans
gaattcactgcggccgccatgaccctggcgccacagtcgat

SEQ ID NO: 38281 - DNA, 40 bp, Emericella nidulans
gttctcgagacgagcgatcgcggcccaagcggcgtaatgg

SEQ ID NO: 38282 - DNA, 45 bp, Emericella nidulans
gaattcactgcggccgccatgatgctcggcaagatcgctctcgaa

SEQ ID NO: 38283 - DNA, 41 bp, Emericella nidulans
gttctcgagacgagcgatcgctgcgcgctgagtgtcgttga

SEQ ID NO: 38284 - DNA, 41 bp, Emericella nidulans
gaattcactgcggccgccatgacagctgggatatgtgatcg

SEQ ID NO: 38285 - DNA, 47 bp, Emericella nidulans
gttctcgagacgagcgatcgcttttggttaagaaagtaataggcatt

SEQ ID NO: 38286 - DNA, 41 bp, Emericella nidulans
gaattcactgcggccgccatgacctcaacctgaggttccct

SEQ ID NO: 38287 - DNA, 41 bp, Emericella nidulans
gttctcgagacgagcgatcgctatcgatcataccgggaggt

SEQ ID NO: 38288 - DNA, 49 bp, Emericella nidulans
gaattcactgcggccgccatgctttatttatataagttattccccaggt

SEQ ID NO: 38289 - DNA, 49 bp, Emericella nidulans
gttctcgagacgagcgatcgcatttctagtactggtagaggtctttatt

SEQ ID NO: 38290 - DNA, 49 bp, Emericella nidulans
gaattcactgcggccgccatgctgagtatgttactgagtacttctagcc

SEQ ID NO: 38291 - DNA, 40 bp, Emericella nidulans
gttctcgagacgagcgatcgcctaagccttcgcatggtca

SEQ ID NO: 38292 - DNA, 41 bp, Emericella nidulans
gaattcactgcggccgccatgatccataacgaagccgtctg

SEQ ID NO: 38293 - DNA, 41 bp, Emericella nidulans
gttctcgagacgagcgatcgctgcttccgcttcttgttctt

SEQ ID NO: 38294 - DNA, 44 bp, Emericella nidulans
gaattcactgcggccgccatgattcgagcgggaactatggagaa

SEQ ID NO: 38295 - DNA, 41 bp, Emericella nidulans
gttctcgagacgagcgatcgccgcggagacgaccggaggta

SEQ ID NO: 38296 - DNA, 41 bp, Emericella nidulans
gaattcactgcggccgccatgggcggagatgctggccccta

SEQ ID NO: 38297 - DNA, 41 bp, Emericella nidulans
gttctcgagacgagcgatcgctacgccacgcgcggttgata

SEQ ID NO: 38298 - DNA, 46 bp, Emericella nidulans
gaattcactgcggccgccatgccattcatccccgaagatcaaagaa

SEQ ID NO: 38299 - DNA, 49 bp, Emericella nidulans
gttctcgagacgagcgatcgcatcgccttacataatcctctacggttgc

SEQ ID NO: 38300 - DNA, 41 bp, Emericella nidulans
gaattcactgcggccgccatgcgtgcacgaccccgaacaga

SEQ ID NO: 38301 - DNA, 48 bp, Emericella nidulans
gttctcgagacgagcgatcgcttccatctcgatagtcccaggcggttt

SEQ ID NO: 38302 - DNA, 42 bp, Emericella nidulans
gaattcactgcggccgccatgattgccgttgaccctgtagcc

SEQ ID NO: 38303 - DNA, 43 bp, Emericella nidulans
gttctcgagacgagcgatcgcggacaggcgcatgaatatgacc

SEQ ID NO: 38304 - DNA, 41 bp, Emericella nidulans
gaattcactgcggccgccatggttgccatggtcggcaagga

SEQ ID NO: 38305 - DNA, 49 bp, Emericella nidulans
gttctcgagacgagcgatcgcgtcttgtcgtccctttagtagtcgctga

SEQ ID NO: 38306 - DNA, 49 bp, Emericella nidulans
gaattcactgcggccgccatggaaacgagacgaaaagaggatctgaggc

SEQ ID NO: 38307 - DNA, 41 bp, Emericella nidulans
gttctcgagacgagcgatcgctgcggctgcttcctgtgcat

SEQ ID NO: 38308 - DNA, 41 bp, Emericella nidulans
gaattcactgcggccgccatgacctccccgaattctaccac

SEQ ID NO: 38309 - DNA, 45 bp, Emericella nidulans
gttctcgagacgagcgatcgccttcctactagctgtttgcggatt

SEQ ID NO: 38310 - DNA, 48 bp, Emericella nidulans
gaattcactgcggccgccatgatctttccttcctatgatcgtgactcg

SEQ ID NO: 38311 - DNA, 48 bp, Emericella nidulans
gttctcgagacgagcgatcgccgagaaccgttcgttctatccccctga

SEQ ID NO: 38312 - DNA, 41 bp, Emericella nidulans
gaattcactgcggccgccatggcgacgtggttggggaggaa

SEQ ID NO: 38313 - DNA, 47 bp, Emericella nidulans
gttctcgagacgagcgatcgcgagatgcaaactgctctcgacgcttt

SEQ ID NO: 38314 - DNA, 46 bp, Emericella nidulans
gaattcactgcggccgccatgagtcctttaacctctaccaaagctg

SEQ ID NO: 38315 - DNA, 47 bp, Emericella nidulans
gttctcgagacgagcgatcgcactagtaattggtttaggacatcttg

SEQ ID NO: 38316 - DNA, 49 bp, Emericella nidulans
gaattcactgcggccgccatggtatgattgttggtaagtctggctctgg

SEQ ID NO: 38317 - DNA, 41 bp, Emericella nidulans
gttctcgagacgagcgatcgccgcgcactgaatgctgacga

SEQ ID NO: 38318 - DNA, 49 bp, Emericella nidulans
gaattcactgcggccgccatgaacatacaacttgtttcgactgcccaga

SEQ ID NO: 38319 - DNA, 48 bp, Emericella nidulans
gttctcgagacgagcgatcgccataacgagtcatcgcatcctggtacg

SEQ ID NO: 38320 - DNA, 43 bp, Emericella nidulans
gaattcactgcggccgccatgccaactcgaaggcaaagaccgt

SEQ ID NO: 38321 - DNA, 41 bp, Emericella nidulans
gttctcgagacgagcgatcgccgctacaggccagccatcca

SEQ ID NO: 38322 - DNA, 41 bp, Emericella nidulans
gaattcactgcggccgccatgtacccagcccagcccatccc

SEQ ID NO: 38323 - DNA, 47 bp, Emericella nidulans
gttctcgagacgagcgatcgctgcccatagggtatacacaaaccttc

SEQ ID NO: 38324 - DNA, 41 bp, Emericella nidulans
gaattcactgcggccgccatgcgacgctcgttcccccatca

SEQ ID NO: 38325 - DNA, 47 bp, Emericella nidulans
gttctcgagacgagcgatcgccaattgtcatgtcctcctggtagtcg

SEQ ID NO: 38326 - DNA, 41 bp, Emericella nidulans
gaattcactgcggccgccatgcaaggccgaacgacccgtca

SEQ ID NO: 38327 - DNA, 41 bp, Emericella nidulans
gttctcgagacgagcgatcgccgcatgtgctgcgagacgaa

SEQ ID NO: 38328 - DNA, 45 bp, Emericella nidulans
gaattcactgcggccgccatgggatcgtcaccgaagaggatcttg

SEQ ID NO: 38329 - DNA, 43 bp, Emericella nidulans
gttctcgagacgagcgatcgctagcgaatagatgggggcaaca

SEQ ID NO: 38330 - DNA, 47 bp, Emericella nidulans
gaattcactgcggccgccatgcgtgacgagatgggtgtcttagaagt

SEQ ID NO: 38331 - DNA, 44 bp, Emericella nidulans
gttctcgagacgagcgatcgcgatcacaacctgctgacggatcg

SEQ ID NO: 38332 - DNA, 41 bp, Emericella nidulans
gaattcactgcggccgccatggctggcgagagtggtactgt

SEQ ID NO: 38333 - DNA, 39 bp, Emericella nidulans
gttctcgagacgagcgatcgcacccacatctccggtcgt

SEQ ID NO: 38334 - DNA, 44 bp, Emericella nidulans
gaattcactgcggccgccatgcgcgtgaagcttaccgtcacctc

SEQ ID NO: 38335 - DNA, 44 bp, Emericella nidulans
gttctcgagacgagcgatcgcagcgcctccgtcgacggtaatga

SEQ ID NO: 38336 - DNA, 41 bp, Emericella nidulans
gaattcactgcggccgccatgtggcgttaacgctcgcccac

SEQ ID NO: 38337 - DNA, 44 bp, Emericella nidulans
gttctcgagacgagcgatcgccagcgctcgaggaaataccccac

SEQ ID NO: 38338 - DNA, 49 bp, Emericella nidulans
gaattcactgcggccgccatgatctatacctcaaccaaagaccccaatg

SEQ ID NO: 38339 - DNA, 49 bp, Emericella nidulans
gttctcgagacgagcgatcgcttatagattcgctcaatgtgggcaggct

SEQ ID NO: 38340 - DNA, 41 bp, Emericella nidulans
gaattcactgcggccgccatgctttatcggctgcggtacat

SEQ ID NO: 38341 - DNA, 39 bp, Emericella nidulans
gttctcgagacgagcgatcgcgcgcacgctagcagcaac

SEQ ID NO: 38342 - DNA, 47 bp, Emericella nidulans
gaattcactgcggccgccatgctaggttattacctcaacacatctcc

SEQ ID NO: 38343 - DNA, 41 bp, Emericella nidulans
gttctcgagacgagcgatcgctcgatacctaaccccagcac

SEQ ID NO: 38344 - DNA, 41 bp, Emericella nidulans
gaattcactgcggccgccatgagcgcaagttcgatgatatg

SEQ ID NO: 38345 - DNA, 41 bp, Emericella nidulans
gttctcgagacgagcgatcgcgccgaagctgccattaatac

SEQ ID NO: 38346 - DNA, 47 bp, Emericella nidulans
gaattcactgcggccgccatggccagtttacaagtaatacataggct

SEQ ID NO: 38347 - DNA, 48 bp, Emericella nidulans
gttctcgagacgagcgatcgctacttatccagagcttgtacttcctcc

SEQ ID NO: 38348 - DNA, 42 bp, Emericella nidulans
gaattcactgcggccgccatgccctcctgcccaactggcaac

SEQ ID NO: 38349 - DNA, 41 bp, Emericella nidulans
gttctcgagacgagcgatcgcggctagggccaggggaagca

SEQ ID NO: 38350 - DNA, 44 bp, Emericella nidulans
gaattcactgcggccgccatgtcaaacaggcgctggacgtagtg

SEQ ID NO: 38351 - DNA, 48 bp, Emericella nidulans
gttctcgagacgagcgatcgcgaaagccacatagtctgctcgggggtg

SEQ ID NO: 38352 - DNA, 41 bp, Emericella nidulans
gaattcactgcggccgccatgccaacgagtcaaatcagcct

SEQ ID NO: 38353 - DNA, 41 bp, Emericella nidulans
gttctcgagacgagcgatcgcgcccgtcattgataagttcg

SEQ ID NO: 38354 - DNA, 41 bp, Emericella nidulans
gaattcactgcggccgccatgggaaagatggtctggggttt

SEQ ID NO: 38355 - DNA, 41 bp, Emericella nidulans
gttctcgagacgagcgatcgcgggtgaaggtgcctgactta

SEQ ID NO: 38356 - DNA, 41 bp, Emericella nidulans
gaattcactgcggccgccatgccccctagcgttctattgct

SEQ ID NO: 38357 - DNA, 41 bp, Emericella nidulans
gttctcgagacgagcgatcgcatgacgtgaacaagtcgaaa

SEQ ID NO: 38358 - DNA, 41 bp, Emericella nidulans
gaattcactgcggccgccatgcagaaagaggacgtgcatca

SEQ ID NO: 38359 - DNA, 42 bp, Emericella nidulans
gttctcgagacgagcgatcgccctgcttcgttttctcaatca

SEQ ID NO: 38360 - DNA, 48 bp, Emericella nidulans
gaattcactgcggccgccatgaaaatcatacatcacgccggacaatca

SEQ ID NO: 38361 - DNA, 43 bp, Emericella nidulans
gttctcgagacgagcgatcgccctccgatcaataggcgcatca

SEQ ID NO: 38362 - DNA, 47 bp, Emericella nidulans
gaattcactgcggccgccatgagaccgaatcgcgataatcacgctca

SEQ ID NO: 38363 - DNA, 43 bp, Emericella nidulans
gttctcgagacgagcgatcgccctcttctcgccagtcgccaac

SEQ ID NO: 38364 - DNA, 48 bp, Emericella nidulans
gaattcactgcggccgccatgaaaacgatgacactagccaaccgcaag

SEQ ID NO: 38365 - DNA, 41 bp, Emericella nidulans
gttctcgagacgagcgatcgcggatcgtggcttccgtaccc

SEQ ID NO: 38366 - DNA, 45 bp, Emericella nidulans
gaattcactgcggccgccatggcgccgaagaaggtcttcaagtca

SEQ ID NO: 38367 - DNA, 41 bp, Emericella nidulans
gttctcgagacgagcgatcgcccacgccccagcccacaata

SEQ ID NO: 38368 - DNA, 41 bp, Emericella nidulans
gaattcactgcggccgccatggttcgtctttagggctcacg

SEQ ID NO: 38369 - DNA, 45 bp, Emericella nidulans
gttctcgagacgagcgatcgcgatctactccaccaaggaatacca

SEQ ID NO: 38370 - DNA, 46 bp, Emericella nidulans
gaattcactgcggccgccatggtgtagcatcacaatgaccaatcca

SEQ ID NO: 38371 - DNA, 45 bp, Emericella nidulans
gttctcgagacgagcgatcgctcaggcaagaccaacaatttcagg

SEQ ID NO: 38372 - DNA, 46 bp, Emericella nidulans
gaattcactgcggccgccatggaggactcgtcttgttcagcggatg

SEQ ID NO: 38373 - DNA, 41 bp, Emericella nidulans
gttctcgagacgagcgatcgcggcctggccgaccccataga

SEQ ID NO: 38374 - DNA, 42 bp, Emericella nidulans
gaattcactgcggccgccatgaactgatgaggaaaaccatga

SEQ ID NO: 38375 - DNA, 45 bp, Emericella nidulans
gttctcgagacgagcgatcgcagttcatgtcttaactgcttggtg

SEQ ID NO: 38376 - DNA, 41 bp, Emericella nidulans
gaattcactgcggccgccatgatatagcggcagaagcagga

SEQ ID NO: 38377 - DNA, 49 bp, Emericella nidulans
gttctcgagacgagcgatcgcattcatataggagttgatgtagtactgt

SEQ ID NO: 38378 - DNA, 43 bp, Emericella nidulans
gaattcactgcggccgccatgcggtcaccgctgatgacattgg

SEQ ID NO: 38379 - DNA, 49 bp, Emericella nidulans
gttctcgagacgagcgatcgcttttaagctccggagtgatttccccatc

SEQ ID NO: 38380 - DNA, 41 bp, Emericella nidulans
gaattcactgcggccgccatgtttttggttccgatcgtctt

SEQ ID NO: 38381 - DNA, 41 bp, Emericella nidulans
gttctcgagacgagcgatcgccagctttgctgcacgttcta

SEQ ID NO: 38382 - DNA, 49 bp, Emericella nidulans
gaattcactgcggccgccatgaagttcatgacacaatcagcaccgagga

SEQ ID NO: 38383 - DNA, 41 bp, Emericella nidulans
gttctcgagacgagcgatcgccggccgggagtggcagtaga

SEQ ID NO: 38384 - DNA, 47 bp, Emericella nidulans
gaattcactgcggccgccatgaatgttcttcctctgctgtcgagatg

SEQ ID NO: 38385 - DNA, 45 bp, Emericella nidulans
gttctcgagacgagcgatcgctggaggatatggaaagcgtgaagg

SEQ ID NO: 38386 - DNA, 42 bp, Emericella nidulans
gaattcactgcggccgccatggcgctcctctgggatctatac

SEQ ID NO: 38387 - DNA, 43 bp, Emericella nidulans
gttctcgagacgagcgatcgctgcatttttgatatctttccag

SEQ ID NO: 38388 - DNA, 46 bp, Emericella nidulans
gaattcactgcggccgccatgtgctttactagacttcaatagcaaa

SEQ ID NO: 38389 - DNA, 41 bp, Emericella nidulans
gttctcgagacgagcgatcgcgtagctccgacgggctaagt

SEQ ID NO: 38390 - DNA, 41 bp, Emericella nidulans
gaattcactgcggccgccatgactcccatggccgcccactt

SEQ ID NO: 38391 - DNA, 48 bp, Emericella nidulans
gttctcgagacgagcgatcgccggaacaaagatcatgctagtcggaac

SEQ ID NO: 38392 - DNA, 45 bp, Emericella nidulans
gaattcactgcggccgccatgatggcgtctaacagaatccgtcgt

SEQ ID NO: 38393 - DNA, 41 bp, Emericella nidulans
gttctcgagacgagcgatcgcagtcgcgccgtcacatcacc

SEQ ID NO: 38394 - DNA, 41 bp, Emericella nidulans
gaattcactgcggccgccatgggaaaaccaactgacggata

SEQ ID NO: 38395 - DNA, 41 bp, Emericella nidulans
gttctcgagacgagcgatcgcttgtacatgttgtgggtgcc

SEQ ID NO: 38396 - DNA, 45 bp, Emericella nidulans
gaattcactgcggccgccatgctggaatcagtctggattcggtga

SEQ ID NO: 38397 - DNA, 47 bp, Emericella nidulans
gttctcgagacgagcgatcgcagccttatcttccatgatccgaaact

SEQ ID NO: 38398 - DNA, 41 bp, Emericella nidulans
gaattcactgcggccgccatgcatcctcccctccgcaccct

SEQ ID NO: 38399 - DNA, 49 bp, Emericella nidulans
gttctcgagacgagcgatcgcagatatatccaacaggacaggcatacgg

SEQ ID NO: 38400 - DNA, 43 bp, Emericella nidulans
gaattcactgcggccgccatgccagggtttccgtgtcgaaatc

SEQ ID NO: 38401 - DNA, 41 bp, Emericella nidulans
gttctcgagacgagcgatcgcgccctcacgagcggcaatct

SEQ ID NO: 38402 - DNA, 44 bp, Emericella nidulans
gaattcactgcggccgccatgcccagaccgtgatatgcccttcg

SEQ ID NO: 38403 - DNA, 45 bp, Emericella nidulans
gttctcgagacgagcgatcgcaggtagcgtactcggcgtaacctt

SEQ ID NO: 38404 - DNA, 41 bp, Emericella nidulans
gaattcactgcggccgccatgccggttgctgaggaacataa

SEQ ID NO: 38405 - DNA, 45 bp, Emericella nidulans
gttctcgagacgagcgatcgctgatgatagaaatagctggattgc

SEQ ID NO: 38406 - DNA, 49 bp, Emericella nidulans
gaattcactgcggccgccatgggcacaagaaacgttagagaccatgtcg

SEQ ID NO: 38407 - DNA, 41 bp, Emericella nidulans
gttctcgagacgagcgatcgccgctccttgccttgcgggat

SEQ ID NO: 38408 - DNA, 49 bp, Emericella nidulans
gaattcactgcggccgccatggatctctacttatacacactgcttctct

SEQ ID NO: 38409 - DNA, 43 bp, Emericella nidulans
gttctcgagacgagcgatcgcctctggagagcagataataacg

SEQ ID NO: 38410 - DNA, 41 bp, Emericella nidulans
gaattcactgcggccgccatgtaagggtctgcgctcgacta

SEQ ID NO: 38411 - DNA, 41 bp, Emericella nidulans
gttctcgagacgagcgatcgcgctttggcttgctttctttg

SEQ ID NO: 38412 - DNA, 41 bp, Emericella nidulans
gaattcactgcggccgccatggccgaatggcatgacctcca

SEQ ID NO: 38413 - DNA, 47 bp, Emericella nidulans
gttctcgagacgagcgatcgcagtccaccagtcgacagtcttggtgt

SEQ ID NO: 38414 - DNA, 47 bp, Emericella nidulans
gaattcactgcggccgccatggccgggtcgtattcgaacccgttaaa

SEQ ID NO: 38415 - DNA, 47 bp, Emericella nidulans
gttctcgagacgagcgatcgcatccatttccgagtgttttggaagga

SEQ ID NO: 38416 - DNA, 45 bp, Emericella nidulans
gaattcactgcggccgccatgtgtggacattggtggcaatactgg

SEQ ID NO: 38417 - DNA, 44 bp, Emericella nidulans
gttctcgagacgagcgatcgccagccgcaaaaatgaccgagctt

SEQ ID NO: 38418 - DNA, 44 bp, Emericella nidulans
gaattcactgcggccgccatgttttcgagatgtgccatccattg

SEQ ID NO: 38419 - DNA, 49 bp, Emericella nidulans
gttctcgagacgagcgatcgctggtggaaattcttcaatgatctcgtca

SEQ ID NO: 38420 - DNA, 43 bp, Emericella nidulans
gaattcactgcggccgccatgcctcactgccaccaaatcaacc

SEQ ID NO: 38421 - DNA, 42 bp, Emericella nidulans
gttctcgagacgagcgatcgctgccctgcctctccaacttcg

SEQ ID NO: 38422 - DNA, 47 bp, Emericella nidulans
gaattcactgcggccgccatggatgactgtgaaaatctacgaatagg

SEQ ID NO: 38423 - DNA, 39 bp, Emericella nidulans
gttctcgagacgagcgatcgcaacgaggcaggcctcaag

SEQ ID NO: 38424 - DNA, 41 bp, Emericella nidulans
gaattcactgcggccgccatggccggcgatgaggtcgttca

SEQ ID NO: 38425 - DNA, 41 bp, Emericella nidulans
gttctcgagacgagcgatcgccggcttctccatcggcttga

SEQ ID NO: 38426 - DNA, 41 bp, Emericella nidulans
gaattcactgcggccgccatgtgtggaagcgcgagagtgcc

SEQ ID NO: 38427 - DNA, 43 bp, Emericella nidulans
gttctcgagacgagcgatcgcgctgacgtcgctggcagacttt

SEQ ID NO: 38428 - DNA, 47 bp, Emericella nidulans
gaattcactgcggccgccatgggtgaagcaggtatgccatcaacagg

SEQ ID NO: 38429 - DNA, 49 bp, Emericella nidulans
gttctcgagacgagcgatcgcagtgttccaacttatactccgtgccctc

SEQ ID NO: 38430 - DNA, 41 bp, Emericella nidulans
gaattcactgcggccgccatgcgtgagccgccttcgcaaat

SEQ ID NO: 38431 - DNA, 49 bp, Emericella nidulans
gttctcgagacgagcgatcgcgttccgtcaatcgtgattctagtttctg

SEQ ID NO: 38432 - DNA, 44 bp, Emericella nidulans
gaattcactgcggccgccatgcacgttcacgttcaacatcccac

SEQ ID NO: 38433 - DNA, 47 bp, Emericella nidulans
gttctcgagacgagcgatcgcattaaagcagtgcaagtaccgggttt

SEQ ID NO: 38434 - DNA, 47 bp, Emericella nidulans
gaattcactgcggccgccatgctccctaacattcaccctcaccccac

SEQ ID NO: 38435 - DNA, 48 bp, Emericella nidulans
gttctcgagacgagcgatcgcaaatcaggaaagctccactgccccctc

SEQ ID NO: 38436 - DNA, 45 bp, Emericella nidulans
gaattcactgcggccgccatgttggtgaagagtacggccatgtga

SEQ ID NO: 38437 - DNA, 41 bp, Emericella nidulans
gttctcgagacgagcgatcgctccgcgagcccacccttaga

SEQ ID NO: 38438 - DNA, 43 bp, Emericella nidulans
gaattcactgcggccgccatggtacatggttcccgcggtttgg

SEQ ID NO: 38439 - DNA, 41 bp, Emericella nidulans
gttctcgagacgagcgatcgcgcgagaaggggtcccgtgaa

SEQ ID NO: 38440 - DNA, 40 bp, Emericella nidulans
gaattcactgcggccgccatgaggcgccttcctggagcat

SEQ ID NO: 38441 - DNA, 49 bp, Emericella nidulans
gttctcgagacgagcgatcgctcattgcaatcgttttacagaatcttcc

SEQ ID NO: 38442 - DNA, 41 bp, Emericella nidulans
gaattcactgcggccgccatgggcacgtgctaaggcgacga

SEQ ID NO: 38443 - DNA, 41 bp, Emericella nidulans
gttctcgagacgagcgatcgcggccgccaaatcctcggaac

SEQ ID NO: 38444 - DNA, 47 bp, Emericella nidulans
gaattcactgcggccgccatgcatgaacacgcctacaccaagattgt

SEQ ID NO: 38445 - DNA, 49 bp, Emericella nidulans
gttctcgagacgagcgatcgcgatccccgttctgtaagttccttaatgc

SEQ ID NO: 38446 - DNA, 41 bp, Emericella nidulans
gaattcactgcggccgccatgcgaaggcgccagcctggtta

SEQ ID NO: 38447 - DNA, 41 bp, Emericella nidulans
gttctcgagacgagcgatcgcgccattcccccgttgaccct

SEQ ID NO: 38448 - DNA, 41 bp, Emericella nidulans
gaattcactgcggccgccatgatcctctggcctttagtggg

SEQ ID NO: 38449 - DNA, 44 bp, Emericella nidulans
gttctcgagacgagcgatcgcgagcatagggtaattgtctttga

SEQ ID NO: 38450 - DNA, 44 bp, Emericella nidulans
gaattcactgcggccgccatgataccgaacatggcccatgaagc

SEQ ID NO: 38451 - DNA, 49 bp, Emericella nidulans
gttctcgagacgagcgatcgcaatccaagtagcccatttcttctgaaac

SEQ ID NO: 38452 - DNA, 41 bp, Emericella nidulans
gaattcactgcggccgccatgcgcagcggggccgtctttat

SEQ ID NO: 38453 - DNA, 45 bp, Emericella nidulans
gttctcgagacgagcgatcgcggtgcgtagtggtgctgctgcata

SEQ ID NO: 38454 - DNA, 46 bp, Emericella nidulans
gaattcactgcggccgccatgagtaagcgtatgggtatcattgttg

SEQ ID NO: 38455 - DNA, 41 bp, Emericella nidulans
gttctcgagacgagcgatcgcgacgtatcagatcggccact

SEQ ID NO: 38456 - DNA, 41 bp, Emericella nidulans
gaattcactgcggccgccatggaccgaggcattcatgttct

SEQ ID NO: 38457 - DNA, 41 bp, Emericella nidulans
gttctcgagacgagcgatcgcagaaggagcctcccacgtat

SEQ ID NO: 38458 - DNA, 44 bp, Emericella nidulans
gaattcactgcggccgccatgcagcatatggttgcctggctggt

SEQ ID NO: 38459 - DNA, 44 bp, Emericella nidulans
gttctcgagacgagcgatcgcatcccctgccataatgtgatgtg

SEQ ID NO: 38460 - DNA, 41 bp, Emericella nidulans
gaattcactgcggccgccatgaacgagccgacatcacttct

SEQ ID NO: 38461 - DNA, 45 bp, Emericella nidulans
gttctcgagacgagcgatcgcaaatccaaatagcatatctcacca

SEQ ID NO: 38462 - DNA, 41 bp, Emericella nidulans
gaattcactgcggccgccatggttagagccttttcgggagg

SEQ ID NO: 38463 - DNA, 42 bp, Emericella nidulans
gttctcgagacgagcgatcgccatgttggctgtgaactcctt

SEQ ID NO: 38464 - DNA, 41 bp, Emericella nidulans
gaattcactgcggccgccatgacgatgtccatttgctggat

SEQ ID NO: 38465 - DNA, 40 bp, Emericella nidulans
gttctcgagacgagcgatcgcctgcagagacaggcgactc

SEQ ID NO: 38466 - DNA, 44 bp, Emericella nidulans
gaattcactgcggccgccatgtgttatgccttttagtttggcta

SEQ ID NO: 38467 - DNA, 48 bp, Emericella nidulans
gttctcgagacgagcgatcgcatacatttgttgtttatttaactgttg

SEQ ID NO: 38468 - DNA, 41 bp, Emericella nidulans
gaattcactgcggccgccatgcggtgaagtctctcttcgtg

SEQ ID NO: 38469 - DNA, 41 bp, Emericella nidulans
gttctcgagacgagcgatcgccaggccagatgtgtcgaata

SEQ ID NO: 38470 - DNA, 41 bp, Emericella nidulans
gaattcactgcggccgccatgggcttacgggtacgttacga

SEQ ID NO: 38471 - DNA, 41 bp, Emericella nidulans
gttctcgagacgagcgatcgcttatcgtctcgagccctttc

SEQ ID NO: 38472 - DNA, 41 bp, Emericella nidulans
gaattcactgcggccgccatgcggcatctcgcttcgccatc

SEQ ID NO: 38473 - DNA, 43 bp, Emericella nidulans
gttctcgagacgagcgatcgcgaaaacaattccacccccgtca

SEQ ID NO: 38474 - DNA, 41 bp, Emericella nidulans
gaattcactgcggccgccatgcgaagaagttcctccctcag

SEQ ID NO: 38475 - DNA, 41 bp, Emericella nidulans
gttctcgagacgagcgatcgctccagaagctgccaaaattc

SEQ ID NO: 38476 - DNA, 47 bp, Emericella nidulans
gaattcactgcggccgccatgacctttttgaagactatcgctggtga

SEQ ID NO: 38477 - DNA, 49 bp, Emericella nidulans
gttctcgagacgagcgatcgccactatccaagccacgagtactgtatcc

SEQ ID NO: 38478 - DNA, 42 bp, Emericella nidulans
gaattcactgcggccgccatggctcgcttgctttgacgaggc

SEQ ID NO: 38479 - DNA, 49 bp, Emericella nidulans
gttctcgagacgagcgatcgcagtcacatgtctagtcaaatgccctctc

SEQ ID NO: 38480 - DNA, 41 bp, Emericella nidulans
gaattcactgcggccgccatgatcccagcatcgtccgccac

SEQ ID NO: 38481 - DNA, 42 bp, Emericella nidulans
gttctcgagacgagcgatcgcgcgtggcattctcaaccgaca

SEQ ID NO: 38482 - DNA, 41 bp, Emericella nidulans
gaattcactgcggccgccatgcgagcccgcagattgatgga

SEQ ID NO: 38483 - DNA, 45 bp, Emericella nidulans
gttctcgagacgagcgatcgccggtatgcggtaacagggttcacg

SEQ ID NO: 38484 - DNA, 41 bp, Emericella nidulans
gaattcactgcggccgccatgtgaagatgctgtcgcaaatc

SEQ ID NO: 38485 - DNA, 41 bp, Emericella nidulans
gttctcgagacgagcgatcgcctcggttcttgagcttggag

SEQ ID NO: 38486 - DNA, 45 bp, Emericella nidulans
gaattcactgcggccgccatgaatggacctcctatgtctgatatg

SEQ ID NO: 38487 - DNA, 49 bp, Emericella nidulans
gttctcgagacgagcgatcgctacgtacaataaccgtattctgtaatga

SEQ ID NO: 38488 - DNA, 49 bp, Emericella nidulans
gaattcactgcggccgccatgcagcatttttggctttgattgaattagc

SEQ ID NO: 38489 - DNA, 43 bp, Emericella nidulans
gttctcgagacgagcgatcgctctgcgaggtagggttcgagga

SEQ ID NO: 38490 - DNA, 41 bp, Emericella nidulans
gaattcactgcggccgccatgccagcttctccctgcataat

SEQ ID NO: 38491 - DNA, 47 bp, Emericella nidulans
gttctcgagacgagcgatcgcgaggtaatccttctttctagaagtcc

SEQ ID NO: 38492 - DNA, 48 bp, Emericella nidulans
gaattcactgcggccgccatgcaagcagacaagaatgcgatcatgaca

SEQ ID NO: 38493 - DNA, 49 bp, Emericella nidulans
gttctcgagacgagcgatcgctgatatccttgctaacagcatcatacgc

SEQ ID NO: 38494 - DNA, 41 bp, Emericella nidulans
gaattcactgcggccgccatgagcctcgccggaagatgacg

SEQ ID NO: 38495 - DNA, 49 bp, Emericella nidulans
gttctcgagacgagcgatcgcggccatatctaaggagatcaacgactgg

SEQ ID NO: 38496 - DNA, 44 bp, Emericella nidulans
gaattcactgcggccgccatgggtgacagacaagctcggccaaa

SEQ ID NO: 38497 - DNA, 41 bp, Emericella nidulans
gttctcgagacgagcgatcgccccttctgcacgccttctcg

SEQ ID NO: 38498 - DNA, 41 bp, Emericella nidulans
gaattcactgcggccgccatgtcgcatctcgcaatggggta

SEQ ID NO: 38499 - DNA, 49 bp, Emericella nidulans
gttctcgagacgagcgatcgctatcccgttgacacggtcaagatcgaca

SEQ ID NO: 38500 - DNA, 40 bp, Emericella nidulans
gaattcactgcggccgccatggcatcgcctgttcatcatc

SEQ ID NO: 38501 - DNA, 41 bp, Emericella nidulans
gttctcgagacgagcgatcgccaatgttcggtgctgtacca

SEQ ID NO: 38502 - DNA, 41 bp, Emericella nidulans
gaattcactgcggccgccatgggccgtcctatccttctacc

SEQ ID NO: 38503 - DNA, 41 bp, Emericella nidulans
gttctcgagacgagcgatcgcatatacaggggcgcaaagtc

SEQ ID NO: 38504 - DNA, 39 bp, Emericella nidulans
gaattcactgcggccgccatgctagccctacccccgaga

SEQ ID NO: 38505 - DNA, 42 bp, Emericella nidulans
gttctcgagacgagcgatcgccgttaatgaaaacatccgttg

SEQ ID NO: 38506 - DNA, 41 bp, Emericella nidulans
gaattcactgcggccgccatgtgctcaactatcctggggtt

SEQ ID NO: 38507 - DNA, 42 bp, Emericella nidulans
gttctcgagacgagcgatcgcgcgcttttaaaaagtgacacc

SEQ ID NO: 38508 - DNA, 47 bp, Emericella nidulans
gaattcactgcggccgccatgccagtttctttgcggtataccgtggg

SEQ ID NO: 38509 - DNA, 45 bp, Emericella nidulans
gttctcgagacgagcgatcgcatcagcccggcctgggcataattg

SEQ ID NO: 38510 - DNA, 43 bp, Emericella nidulans
gaattcactgcggccgccatggcaccgttcccaacattggctc

SEQ ID NO: 38511 - DNA, 48 bp, Emericella nidulans
gttctcgagacgagcgatcgccaccacaagcaaaaacgtatcctctcg

SEQ ID NO: 38512 - DNA, 45 bp, Emericella nidulans
gaattcactgcggccgccatgtttcccaaacatcttcatatcctt

SEQ ID NO: 38513 - DNA, 41 bp, Emericella nidulans
gttctcgagacgagcgatcgcagtgaccatttgagccgttc

SEQ ID NO: 38514 - DNA, 47 bp, Emericella nidulans
gaattcactgcggccgccatggaccaaagcatacaaggatgcaaaca

SEQ ID NO: 38515 - DNA, 47 bp, Emericella nidulans
gttctcgagacgagcgatcgctctgtcaaggccctgagcaaggacca

SEQ ID NO: 38516 - DNA, 43 bp, Emericella nidulans
gaattcactgcggccgccatgctggcaaacgtacaatcgcaaa

SEQ ID NO: 38517 - DNA, 41 bp, Emericella nidulans
gttctcgagacgagcgatcgcagacgccgcgtgattggctc

SEQ ID NO: 38518 - DNA, 41 bp, Emericella nidulans
gaattcactgcggccgccatgggggagaggacgaccgagcc

SEQ ID NO: 38519 - DNA, 39 bp, Emericella nidulans
gttctcgagacgagcgatcgcgttggcgcggggcgtgtg

SEQ ID NO: 38520 - DNA, 42 bp, Emericella nidulans
gaattcactgcggccgccatgccgagaccaaggtgcccttca

SEQ ID NO: 38521 - DNA, 46 bp, Emericella nidulans
gttctcgagacgagcgatcgcgaaagctttccacacaatggactcg

SEQ ID NO: 38522 - DNA, 49 bp, Emericella nidulans
gaattcactgcggccgccatgcaagggcgttgatgtttcagacgggaag

SEQ ID NO: 38523 - DNA, 44 bp, Emericella nidulans
gttctcgagacgagcgatcgcgccggaagatcatccacctgtgc

SEQ ID NO: 38524 - DNA, 45 bp, Emericella nidulans
gaattcactgcggccgccatgaggagaccgagtactacatcaaca

SEQ ID NO: 38525 - DNA, 39 bp, Emericella nidulans
gttctcgagacgagcgatcgcgagagcgcagcatcaggt

SEQ ID NO: 38526 - DNA, 46 bp, Emericella nidulans
gaattcactgcggccgccatgatgggaggatcactatcgcggcttt

SEQ ID NO: 38527 - DNA, 49 bp, Emericella nidulans
gttctcgagacgagcgatcgccgtcgaagaaagagatgaacttaccacc

SEQ ID NO: 38528 - DNA, 41 bp, Emericella nidulans
gaattcactgcggccgccatgatcattgtcggtaagggtgc

SEQ ID NO: 38529 - DNA, 39 bp, Emericella nidulans
gttctcgagacgagcgatcgcgaagccgaacgcactgtc

SEQ ID NO: 38530 - DNA, 49 bp, Emericella nidulans
gaattcactgcggccgccatgaatgctcctctcacttttcgctgcgttg

SEQ ID NO: 38531 - DNA, 41 bp, Emericella nidulans
gttctcgagacgagcgatcgccgggtgtcggggttcttgga

SEQ ID NO: 38532 - DNA, 44 bp, Emericella nidulans
gaattcactgcggccgccatgggctaactttaaagcagcgcacc

SEQ ID NO: 38533 - DNA, 48 bp, Emericella nidulans
gttctcgagacgagcgatcgccaccaatctcttggcgtagtttgtcca

SEQ ID NO: 38534 - DNA, 44 bp, Emericella nidulans
gaattcactgcggccgccatgaagcattagcagtctcttgttct

SEQ ID NO: 38535 - DNA, 41 bp, Emericella nidulans
gttctcgagacgagcgatcgcacattctcggcagtggaaac

SEQ ID NO: 38536 - DNA, 40 bp, Emericella nidulans
gaattcactgcggccgccatgcgcgctcgttcacctacac

SEQ ID NO: 38537 - DNA, 41 bp, Emericella nidulans
gttctcgagacgagcgatcgccagcttcaatcgagtccaca

SEQ ID NO: 38538 - DNA, 43 bp, Emericella nidulans
gaattcactgcggccgccatggcagaatcaagcatgccacagc

SEQ ID NO: 38539 - DNA, 44 bp, Emericella nidulans
gttctcgagacgagcgatcgcggtcagtgagaaggtcgccatcg

SEQ ID NO: 38540 - DNA, 41 bp, Emericella nidulans
gaattcactgcggccgccatgcgctctgtacacgagtctgc

SEQ ID NO: 38541 - DNA, 41 bp, Emericella nidulans
gttctcgagacgagcgatcgcaagcgcgacaattagtccat

SEQ ID NO: 38542 - DNA, 41 bp, Emericella nidulans
gaattcactgcggccgccatgaagtggccaaagttggattg

SEQ ID NO: 38543 - DNA, 41 bp, Emericella nidulans
gttctcgagacgagcgatcgcgtcctgccttacccacttga

SEQ ID NO: 38544 - DNA, 46 bp, Emericella nidulans
gaattcactgcggccgccatgtttcgaagcacatatccgtggtaca

SEQ ID NO: 38545 - DNA, 49 bp, Emericella nidulans
gttctcgagacgagcgatcgccgtacgacgtctttcttattgactttcc

SEQ ID NO: 38546 - DNA, 49 bp, Emericella nidulans
gaattcactgcggccgccatgatacagccggtctcatctttggcgcaac

SEQ ID NO: 38547 - DNA, 41 bp, Emericella nidulans
gttctcgagacgagcgatcgctcagtccagtcccgccagca

SEQ ID NO: 38548 - DNA, 49 bp, Emericella nidulans
gaattcactgcggccgccatgacccatctagctattcctccgtatcagg

SEQ ID NO: 38549 - DNA, 49 bp, Emericella nidulans
gttctcgagacgagcgatcgcataaaacgatgtagaggagtgcgccgta

SEQ ID NO: 38550 - DNA, 48 bp, Emericella nidulans
gaattcactgcggccgccatggctgaaagaggcagagaagatgtatca

SEQ ID NO: 38551 - DNA, 45 bp, Emericella nidulans
gttctcgagacgagcgatcgcttgactgtcacaagggtggacgtg

SEQ ID NO: 38552 - DNA, 44 bp, Emericella nidulans
gaattcactgcggccgccatggcatgcggcactatcttgaggga

SEQ ID NO: 38553 - DNA, 44 bp, Emericella nidulans
gttctcgagacgagcgatcgccagtcgtggtgttggcagtcgaa

SEQ ID NO: 38554 - DNA, 41 bp, Emericella nidulans
gaattcactgcggccgccatgtgccagtcccgacggcagtt

SEQ ID NO: 38555 - DNA, 46 bp, Emericella nidulans
gttctcgagacgagcgatcgctgctgacaaaattgggaaattccag

SEQ ID NO: 38556 - DNA, 46 bp, Emericella nidulans
gaattcactgcggccgccatgagtgattgggtggacaagaggcaca

SEQ ID NO: 38557 - DNA, 44 bp, Emericella nidulans
gttctcgagacgagcgatcgcccttgcgagacggatcgtaactg

SEQ ID NO: 38558 - DNA, 41 bp, Emericella nidulans
gaattcactgcggccgccatgaacaaagccgcgcaaggtct

SEQ ID NO: 38559 - DNA, 41 bp, Emericella nidulans
gttctcgagacgagcgatcgccggttaccggggcccagaag

SEQ ID NO: 38560 - DNA, 41 bp, Emericella nidulans
gaattcactgcggccgccatgcgcttgcgcggcttcaaaat

SEQ ID NO: 38561 - DNA, 41 bp, Emericella nidulans
gttctcgagacgagcgatcgccgactggcaccagcagttca

SEQ ID NO: 38562 - DNA, 44 bp, Emericella nidulans
gaattcactgcggccgccatgattggattaacgaagctcgtatg

SEQ ID NO: 38563 - DNA, 41 bp, Emericella nidulans
gttctcgagacgagcgatcgcaagctgccgcacacatataa

SEQ ID NO: 38564 - DNA, 49 bp, Emericella nidulans
gaattcactgcggccgccatgatgtcttcccaagaatactacagcgaca

SEQ ID NO: 38565 - DNA, 47 bp, Emericella nidulans
gttctcgagacgagcgatcgcatcagaggaagatgaagacgatgagc

SEQ ID NO: 38566 - DNA, 49 bp, Emericella nidulans
gaattcactgcggccgccatgatgttatccatattgagaaaagcgaggc

SEQ ID NO: 38567 - DNA, 49 bp, Emericella nidulans
gttctcgagacgagcgatcgcataggaataacctgtcctttgcatcctg

SEQ ID NO: 38568 - DNA, 44 bp, Emericella nidulans
gaattcactgcggccgccatgctttgcttcgctcgcccccatgt

SEQ ID NO: 38569 - DNA, 41 bp, Emericella nidulans
gttctcgagacgagcgatcgcgccgcgatctcccaggttga

SEQ ID NO: 38570 - DNA, 44 bp, Emericella nidulans
gaattcactgcggccgccatggccaggaagattgcgcttccgta

SEQ ID NO: 38571 - DNA, 41 bp, Emericella nidulans
gttctcgagacgagcgatcgcggagccgagcgtcgcgttta

SEQ ID NO: 38572 - DNA, 42 bp, Emericella nidulans
gaattcactgcggccgccatgtggtgaggcgggaattgcaga

SEQ ID NO: 38573 - DNA, 48 bp, Emericella nidulans
gttctcgagacgagcgatcgctaagagccggaagcttacatggtgagg

SEQ ID NO: 38574 - DNA, 44 bp, Emericella nidulans
gaattcactgcggccgccatgcgccgagtgattctgtctgggac

SEQ ID NO: 38575 - DNA, 49 bp, Emericella nidulans
gttctcgagacgagcgatcgctgctgctgagaaggaatacaaactcttc

SEQ ID NO: 38576 - DNA, 41 bp, Emericella nidulans
gaattcactgcggccgccatgcgccttccgtcgctgattgg

SEQ ID NO: 38577 - DNA, 49 bp, Emericella nidulans
gttctcgagacgagcgatcgcgaaagcaggcttcctcttctccgcgaac

SEQ ID NO: 38578 - DNA, 43 bp, Emericella nidulans
gaattcactgcggccgccatgccgctgatgccgattttaatgc

SEQ ID NO: 38579 - DNA, 49 bp, Emericella nidulans
gttctcgagacgagcgatcgcaatgcacaatgaatgtctggatatcacc

SEQ ID NO: 38580 - DNA, 45 bp, Emericella nidulans
gaattcactgcggccgccatgtgaagacgaggtggattcctggat

SEQ ID NO: 38581 - DNA, 41 bp, Emericella nidulans
gttctcgagacgagcgatcgctatccgcccctgtccaacct

SEQ ID NO: 38582 - DNA, 43 bp, Emericella nidulans
gaattcactgcggccgccatgacatgggaagccggttgctgtt

SEQ ID NO: 38583 - DNA, 41 bp, Emericella nidulans
gttctcgagacgagcgatcgccagcaggcacagggtcagca

SEQ ID NO: 38584 - DNA, 49 bp, Emericella nidulans
gaattcactgcggccgccatggcttgagcttctcaaccagttagatgga

SEQ ID NO: 38585 - DNA, 41 bp, Emericella nidulans
gttctcgagacgagcgatcgcgaccgccgtcctgcttcgtc

SEQ ID NO: 38586 - DNA, 41 bp, Emericella nidulans
gaattcactgcggccgccatgcttgagcctgcctacagctt

SEQ ID NO: 38587 - DNA, 41 bp, Emericella nidulans
gttctcgagacgagcgatcgcttcttgcggtcaccatagtc

SEQ ID NO: 38588 - DNA, 46 bp, Emericella nidulans
gaattcactgcggccgccatgtaccgcgtgaaagtgtggaaaagca

SEQ ID NO: 38589 - DNA, 49 bp, Emericella nidulans
gttctcgagacgagcgatcgcaggcttagagactagctcaacaccaatg

SEQ ID NO: 38590 - DNA, 43 bp, Emericella nidulans
gaattcactgcggccgccatgtccgcacattgttgagcgcatt

SEQ ID NO: 38591 - DNA, 41 bp, Emericella nidulans
gttctcgagacgagcgatcgcgcgacgcttgccttggttcc

SEQ ID NO: 38592 - DNA, 42 bp, Emericella nidulans
gaattcactgcggccgccatgggcatgcagcttgcacagagg

SEQ ID NO: 38593 - DNA, 48 bp, Emericella nidulans
gttctcgagacgagcgatcgcgaagatttcgtcgaacggtcgagtgtc

SEQ ID NO: 38594 - DNA, 41 bp, Emericella nidulans
gaattcactgcggccgccatgcagggcgtccatcgcaagaa

SEQ ID NO: 38595 - DNA, 42 bp, Emericella nidulans
gttctcgagacgagcgatcgctcccccttcgttcccttcagc

SEQ ID NO: 38596 - DNA, 42 bp, Emericella nidulans
gaattcactgcggccgccatgggggtgctgcggcttcgaata

SEQ ID NO: 38597 - DNA, 46 bp, Emericella nidulans
gttctcgagacgagcgatcgcgacggccatctggtactgtttatcg

SEQ ID NO: 38598 - DNA, 41 bp, Emericella nidulans
gaattcactgcggccgccatgccgagcaccctgggatcgac

SEQ ID NO: 38599 - DNA, 41 bp, Emericella nidulans
gttctcgagacgagcgatcgcgcgcccgctccatatccaca

SEQ ID NO: 38600 - DNA, 42 bp, Emericella nidulans
gaattcactgcggccgccatggcggctgatttctgggccaac

SEQ ID NO: 38601 - DNA, 47 bp, Emericella nidulans
gttctcgagacgagcgatcgcacgatagaacgggaagaaagccgaca

SEQ ID NO: 38602 - DNA, 41 bp, Emericella nidulans
gaattcactgcggccgccatgactttgccagcggggcacac

SEQ ID NO: 38603 - DNA, 47 bp, Emericella nidulans
gttctcgagacgagcgatcgccaagtctgtggtcgatgatctttcca

SEQ ID NO: 38604 - DNA, 49 bp, Emericella nidulans
gaattcactgcggccgccatgtcacctcggtgagtttagcctggcgact

SEQ ID NO: 38605 - DNA, 48 bp, Emericella nidulans
gttctcgagacgagcgatcgcggcaagcttcatgatgaagataggtga

SEQ ID NO: 38606 - DNA, 41 bp, Emericella nidulans
gaattcactgcggccgccatgagtagcgggtgatgataccg

SEQ ID NO: 38607 - DNA, 41 bp, Emericella nidulans
gttctcgagacgagcgatcgcgcagtccagactgcatacca

SEQ ID NO: 38608 - DNA, 45 bp, Emericella nidulans
gaattcactgcggccgccatgagctccttcaagaaatcgaatccc

SEQ ID NO: 38609 - DNA, 41 bp, Emericella nidulans
gttctcgagacgagcgatcgctcacgcccgtccagacttca

SEQ ID NO: 38610 - DNA, 43 bp, Emericella nidulans
gaattcactgcggccgccatgatatggaggcggaaatggtgtg

SEQ ID NO: 38611 - DNA, 46 bp, Emericella nidulans
gttctcgagacgagcgatcgccatcatttcacttactgcccgtcca

SEQ ID NO: 38612 - DNA, 45 bp, Emericella nidulans
gaattcactgcggccgccatgggatctgtcgtttcgtcgcttttc

SEQ ID NO: 38613 - DNA, 45 bp, Emericella nidulans
gttctcgagacgagcgatcgcagctccatcaaccgatcaccttca

SEQ ID NO: 38614 - DNA, 41 bp, Emericella nidulans
gaattcactgcggccgccatgattagagcccttgccctctg

SEQ ID NO: 38615 - DNA, 48 bp, Emericella nidulans
gttctcgagacgagcgatcgcattcttacctatgtatgtatcctcagc

SEQ ID NO: 38616 - DNA, 46 bp, Emericella nidulans
gaattcactgcggccgccatggagaatatcattgtgggcggcctct

SEQ ID NO: 38617 - DNA, 41 bp, Emericella nidulans
gttctcgagacgagcgatcgccccccggcccagaagacaat

SEQ ID NO: 38618 - DNA, 42 bp, Emericella nidulans
gaattcactgcggccgccatgcagcctatatcgacgatgtgc

SEQ ID NO: 38619 - DNA, 48 bp, Emericella nidulans
gttctcgagacgagcgatcgcttaagcctgttatctttattattaggt

SEQ ID NO: 38620 - DNA, 46 bp, Emericella nidulans
gaattcactgcggccgccatggaactcactcccgaagtggaacgtc

SEQ ID NO: 38621 - DNA, 43 bp, Emericella nidulans
gttctcgagacgagcgatcgccagttccatccactcggcagca

SEQ ID NO: 38622 - DNA, 41 bp, Emericella nidulans
gaattcactgcggccgccatgcacagctttcccccagtatt

SEQ ID NO: 38623 - DNA, 41 bp, Emericella nidulans
gttctcgagacgagcgatcgcggtcgcttggatgatcagtt

SEQ ID NO: 38624 - DNA, 49 bp, Emericella nidulans
gaattcactgcggccgccatgtaataccttcctcgctgcatcaatagac

SEQ ID NO: 38625 - DNA, 46 bp, Emericella nidulans
gttctcgagacgagcgatcgcggaacaccaatctcatatcccagca

SEQ ID NO: 38626 - DNA, 44 bp, Emericella nidulans
gaattcactgcggccgccatgacaagacgctctggatatacaat

SEQ ID NO: 38627 - DNA, 41 bp, Emericella nidulans
gttctcgagacgagcgatcgctgatgaaggaattgaaggct

SEQ ID NO: 38628 - DNA, 41 bp, Emericella nidulans
gaattcactgcggccgccatgtgggctggtcaactacatca

SEQ ID NO: 38629 - DNA, 41 bp, Emericella nidulans
gttctcgagacgagcgatcgccgtgtcgttcaacaatgaaa

SEQ ID NO: 38630 - DNA, 41 bp, Emericella nidulans
gaattcactgcggccgccatgatggtgaatacgtcgccaac

SEQ ID NO: 38631 - DNA, 44 bp, Emericella nidulans
gttctcgagacgagcgatcgcttctttttgctatcttcctcagc

SEQ ID NO: 38632 - DNA, 41 bp, Emericella nidulans
gaattcactgcggccgccatggctcacgacactcactggaa

SEQ ID NO: 38633 - DNA, 41 bp, Emericella nidulans
gttctcgagacgagcgatcgctcgagcgggtcaaagtatct

SEQ ID NO: 38634 - DNA, 45 bp, Emericella nidulans
gaattcactgcggccgccatgagggttcggacgttcacaattctc

SEQ ID NO: 38635 - DNA, 41 bp, Emericella nidulans
gttctcgagacgagcgatcgcttcgacaacgccgttcgaca

SEQ ID NO: 38636 - DNA, 42 bp, Emericella nidulans
gaattcactgcggccgccatgcgagcctacgtcgaccccaca

SEQ ID NO: 38637 - DNA, 41 bp, Emericella nidulans
gttctcgagacgagcgatcgcgctgcgccgaatatggcacc

SEQ ID NO: 38638 - DNA, 48 bp, Emericella nidulans
gaattcactgcggccgccatgggtcctcttagcggcaaagtagcagtc

SEQ ID NO: 38639 - DNA, 41 bp, Emericella nidulans
gttctcgagacgagcgatcgcggctcgtctcgcggctcaat

SEQ ID NO: 38640 - DNA, 45 bp, Emericella nidulans
gaattcactgcggccgccatgtgcaacaactctctccgcacattg

SEQ ID NO: 38641 - DNA, 49 bp, Emericella nidulans
gttctcgagacgagcgatcgcaaacctgaaagatagggcatatccgttg

SEQ ID NO: 38642 - DNA, 41 bp, Emericella nidulans
gaattcactgcggccgccatgggcaaccatggccctcgaac

SEQ ID NO: 38643 - DNA, 47 bp, Emericella nidulans
gttctcgagacgagcgatcgcctttgtctaggcctttctgggtctgc

SEQ ID NO: 38644 - DNA, 42 bp, Emericella nidulans
gaattcactgcggccgccatgcgacctcgacgcgagctacca

SEQ ID NO: 38645 - DNA, 42 bp, Emericella nidulans
gttctcgagacgagcgatcgcaacaccgtctgcatccccatt

SEQ ID NO: 38646 - DNA, 49 bp, Emericella nidulans
gaattcactgcggccgccatgttggatacctgtatgtccaattttgagg

SEQ ID NO: 38647 - DNA, 47 bp, Emericella nidulans
gttctcgagacgagcgatcgcggcgtatgcacagtaggcatcggtga

SEQ ID NO: 38648 - DNA, 40 bp, Emericella nidulans
gaattcactgcggccgccatgcctgatccgcttcgatctt

SEQ ID NO: 38649 - DNA, 42 bp, Emericella nidulans
gttctcgagacgagcgatcgcccgcaccactagtattcaaag

SEQ ID NO: 38650 - DNA, 41 bp, Emericella nidulans
gaattcactgcggccgccatgccacgaaccaggatgttttt

SEQ ID NO: 38651 - DNA, 48 bp, Emericella nidulans
gttctcgagacgagcgatcgctcattatcactgcagtcaaaattgtat

SEQ ID NO: 38652 - DNA, 44 bp, Emericella nidulans
gaattcactgcggccgccatggcaagcgagatgagcttgcagga

SEQ ID NO: 38653 - DNA, 41 bp, Emericella nidulans
gttctcgagacgagcgatcgccatcgtctggggcaggtggg

SEQ ID NO: 38654 - DNA, 45 bp, Emericella nidulans
gaattcactgcggccgccatgtcatgggctcattatttctctaca

SEQ ID NO: 38655 - DNA, 41 bp, Emericella nidulans
gttctcgagacgagcgatcgcgagcggaaagtactgggagc

SEQ ID NO: 38656 - DNA, 47 bp, Emericella nidulans
gaattcactgcggccgccatgctggctcataggggaagacaaaactc

SEQ ID NO: 38657 - DNA, 49 bp, Emericella nidulans
gttctcgagacgagcgatcgctatagatcggtttttgcaggtaacacca

SEQ ID NO: 38658 - DNA, 41 bp, Emericella nidulans
gaattcactgcggccgccatgctaacccgtgtcgcccaagc

SEQ ID NO: 38659 - DNA, 45 bp, Emericella nidulans
gttctcgagacgagcgatcgcctgaactcccttgaacctcggagc

SEQ ID NO: 38660 - DNA, 49 bp, Emericella nidulans
gaattcactgcggccgccatggggattgaccaagggtattgagtttttg

SEQ ID NO: 38661 - DNA, 45 bp, Emericella nidulans
gttctcgagacgagcgatcgccgacaagaacaacatcagcatcca

SEQ ID NO: 38662 - DNA, 40 bp, Emericella nidulans
gaattcactgcggccgccatgctcaaatggcatccacgtc

SEQ ID NO: 38663 - DNA, 40 bp, Emericella nidulans
gttctcgagacgagcgatcgcctttaaatgccgccgaatc

SEQ ID NO: 38664 - DNA, 41 bp, Emericella nidulans
gaattcactgcggccgccatgctgcagccgcactctactct

SEQ ID NO: 38665 - DNA, 48 bp, Emericella nidulans
gttctcgagacgagcgatcgcggacatcctctagtgaatatagctctg

SEQ ID NO: 38666 - DNA, 48 bp, Emericella nidulans
gaattcactgcggccgccatgcggcagctgagtcggatatgcatgttt

SEQ ID NO: 38667 - DNA, 49 bp, Emericella nidulans
gttctcgagacgagcgatcgcctaattgtctactcagctccaagcctca

SEQ ID NO: 38668 - DNA, 41 bp, Emericella nidulans
gaattcactgcggccgccatgctttccaatcgcaccttcac

SEQ ID NO: 38669 - DNA, 42 bp, Emericella nidulans
gttctcgagacgagcgatcgcagcatcgagactttcatgtca

SEQ ID NO: 38670 - DNA, 48 bp, Emericella nidulans
gaattcactgcggccgccatgcctagtttaccgccgtaaaaacaaacc

SEQ ID NO: 38671 - DNA, 49 bp, Emericella nidulans
gttctcgagacgagcgatcgcggcttcgtcagctagtttgaaggttatc

SEQ ID NO: 38672 - DNA, 41 bp, Emericella nidulans
gaattcactgcggccgccatggagctggcgtttagttttgc

SEQ ID NO: 38673 - DNA, 41 bp, Emericella nidulans
gttctcgagacgagcgatcgcgtatcccttgacccccatct

SEQ ID NO: 38674 - DNA, 43 bp, Emericella nidulans
gaattcactgcggccgccatgtcgaatgaacaagccactgacg

SEQ ID NO: 38675 - DNA, 47 bp, Emericella nidulans
gttctcgagacgagcgatcgccatgctctctcagatgcaaacgaagc

SEQ ID NO: 38676 - DNA, 41 bp, Emericella nidulans
gaattcactgcggccgccatgatcgcgaagatcatctcagg

SEQ ID NO: 38677 - DNA, 41 bp, Emericella nidulans
gttctcgagacgagcgatcgccatttgcgctgatgacagat

SEQ ID NO: 38678 - DNA, 41 bp, Emericella nidulans
gaattcactgcggccgccatggctggccaacgcgcaaccta

SEQ ID NO: 38679 - DNA, 42 bp, Emericella nidulans
gttctcgagacgagcgatcgcgcagaccgaggaaaccggtgg

SEQ ID NO: 38680 - DNA, 49 bp, Emericella nidulans
gaattcactgcggccgccatgggtttgtttttagggctttgccaatctg

SEQ ID NO: 38681 - DNA, 46 bp, Emericella nidulans
gttctcgagacgagcgatcgcgcttcttcatgccatccacaagctc

SEQ ID NO: 38682 - DNA, 41 bp, Emericella nidulans
gaattcactgcggccgccatgggatccattccaaggtcaaa

SEQ ID NO: 38683 - DNA, 41 bp, Emericella nidulans
gttctcgagacgagcgatcgcggcctgctcatgtacatcct

SEQ ID NO: 38684 - DNA, 43 bp, Emericella nidulans
gaattcactgcggccgccatgcgtcaggccattgagaaccacc

SEQ ID NO: 38685 - DNA, 45 bp, Emericella nidulans
gttctcgagacgagcgatcgctcgatgtccatgtccttcatgacc

SEQ ID NO: 38686 - DNA, 41 bp, Emericella nidulans
gaattcactgcggccgccatgtcaggcaccaacacagtctc

SEQ ID NO: 38687 - DNA, 41 bp, Emericella nidulans
gttctcgagacgagcgatcgcccatgtgcctgcacactatg

SEQ ID NO: 38688 - DNA, 43 bp, Emericella nidulans
gaattcactgcggccgccatgaccagacgatgtccagctaccg

SEQ ID NO: 38689 - DNA, 43 bp, Emericella nidulans
gttctcgagacgagcgatcgctcgaatcttgccccgcctactg

SEQ ID NO: 38690 - DNA, 42 bp, Emericella nidulans
gaattcactgcggccgccatgtcctgctaatcctaccagatg

SEQ ID NO: 38691 - DNA, 40 bp, Emericella nidulans
gttctcgagacgagcgatcgcccttcgcctccctacacat

SEQ ID NO: 38692 - DNA, 48 bp, Emericella nidulans
gaattcactgcggccgccatgttttctttccaattttgctctctcgtt

SEQ ID NO: 38693 - DNA, 44 bp, Emericella nidulans
gttctcgagacgagcgatcgcgacgcactttcctccatcaacca

SEQ ID NO: 38694 - DNA, 41 bp, Emericella nidulans
gaattcactgcggccgccatggtgtcctacggtgaggcgta

SEQ ID NO: 38695 - DNA, 47 bp, Emericella nidulans
gttctcgagacgagcgatcgctttcttctatttttccttcttattct

SEQ ID NO: 38696 - DNA, 39 bp, Emericella nidulans
gaattcactgcggccgccatgagcccgacgatgccacat

SEQ ID NO: 38697 - DNA, 46 bp, Emericella nidulans
gttctcgagacgagcgatcgcgaaagtgactaactccgccaaatcc

SEQ ID NO: 38698 - DNA, 41 bp, Emericella nidulans
gaattcactgcggccgccatgtgctcccgcccttcctgttc

SEQ ID NO: 38699 - DNA, 47 bp, Emericella nidulans
gttctcgagacgagcgatcgcgggggatgataccagcatcgataaca

SEQ ID NO: 38700 - DNA, 46 bp, Emericella nidulans
gaattcactgcggccgccatgaaatactcattgcttccagaactca

SEQ ID NO: 38701 - DNA, 41 bp, Emericella nidulans
gttctcgagacgagcgatcgcccgtggtttattgccatttc

SEQ ID NO: 38702 - DNA, 46 bp, Emericella nidulans
gaattcactgcggccgccatggggaggttctacttggcatcacagg

SEQ ID NO: 38703 - DNA, 45 bp, Emericella nidulans
gttctcgagacgagcgatcgcatgccttgttccagggtgatgtcg

SEQ ID NO: 38704 - DNA, 41 bp, Emericella nidulans
gaattcactgcggccgccatgtgaagctgcttgctctttcc

SEQ ID NO: 38705 - DNA, 44 bp, Emericella nidulans
gttctcgagacgagcgatcgctgagacagagactgagtaagagg

SEQ ID NO: 38706 - DNA, 49 bp, Emericella nidulans
gaattcactgcggccgccatgcttgatgttgaaaagagagaatgggctc

SEQ ID NO: 38707 - DNA, 46 bp, Emericella nidulans
gttctcgagacgagcgatcgcaaagtgctcggtgatgatacccaaa

SEQ ID NO: 38708 - DNA, 49 bp, Emericella nidulans
gaattcactgcggccgccatgcaaaatatggatgatcctatttcccacc

SEQ ID NO: 38709 - DNA, 49 bp, Emericella nidulans
gttctcgagacgagcgatcgctgacttacaactgtgattgtctccatgc

SEQ ID NO: 38710 - DNA, 41 bp, Emericella nidulans
gaattcactgcggccgccatggcacgggctcgttcatggat

SEQ ID NO: 38711 - DNA, 47 bp, Emericella nidulans
gttctcgagacgagcgatcgcacccttcactatatccggtcgttgga

SEQ ID NO: 38712 - DNA, 41 bp, Emericella nidulans
gaattcactgcggccgccatgcaggctatcgaaaagtcgaa

SEQ ID NO: 38713 - DNA, 40 bp, Emericella nidulans
gttctcgagacgagcgatcgccccacattcccagcttttg

SEQ ID NO: 38714 - DNA, 45 bp, Emericella nidulans
gaattcactgcggccgccatggtgctgtgcggtcttaacggaccc

SEQ ID NO: 38715 - DNA, 44 bp, Emericella nidulans
gttctcgagacgagcgatcgcgagcatgaccgcgtactccttgg

SEQ ID NO: 38716 - DNA, 44 bp, Emericella nidulans
gaattcactgcggccgccatgcggcaagttcgaggttgctctcc

SEQ ID NO: 38717 - DNA, 41 bp, Emericella nidulans
gttctcgagacgagcgatcgcgcctcggcgaccttggtgaa

SEQ ID NO: 38718 - DNA, 41 bp, Emericella nidulans
gaattcactgcggccgccatgcgcttaccaccctggcagca

SEQ ID NO: 38719 - DNA, 41 bp, Emericella nidulans
gttctcgagacgagcgatcgctatcgccagcaccgcccatt

SEQ ID NO: 38720 - DNA, 49 bp, Emericella nidulans
gaattcactgcggccgccatggcgaagaatacaaaaagttcttgctcca

SEQ ID NO: 38721 - DNA, 42 bp, Emericella nidulans
gttctcgagacgagcgatcgctggccttgtcaccccagagga

SEQ ID NO: 38722 - DNA, 46 bp, Emericella nidulans
gaattcactgcggccgccatgactccagacagcttgaggtcggtca

SEQ ID NO: 38723 - DNA, 41 bp, Emericella nidulans
gttctcgagacgagcgatcgcgccggaccgattggtgaaca

SEQ ID NO: 38724 - DNA, 41 bp, Emericella nidulans
gaattcactgcggccgccatgggaaggggtccttctctgtc

SEQ ID NO: 38725 - DNA, 41 bp, Emericella nidulans
gttctcgagacgagcgatcgcatgccgtattgggtttcgta

SEQ ID NO: 38726 - DNA, 43 bp, Emericella nidulans
gaattcactgcggccgccatgtttcgctgcgttcaagggcaat

SEQ ID NO: 38727 - DNA, 47 bp, Emericella nidulans
gttctcgagacgagcgatcgcactcacacatgagtacaaaggcgaaa

SEQ ID NO: 38728 - DNA, 42 bp, Emericella nidulans
gaattcactgcggccgccatgcggcaagtcacagcggtttcc

SEQ ID NO: 38729 - DNA, 49 bp, Emericella nidulans
gttctcgagacgagcgatcgccgagatagtgtttgaaggagagggcttc

SEQ ID NO: 38730 - DNA, 41 bp, Emericella nidulans
gaattcactgcggccgccatggcccggctcctccacagcta

SEQ ID NO: 38731 - DNA, 46 bp, Emericella nidulans
gttctcgagacgagcgatcgccttgcgagagaagcgtttgttcagg

SEQ ID NO: 38732 - DNA, 41 bp, Emericella nidulans
gaattcactgcggccgccatggccgaggcctgggacaggat

SEQ ID NO: 38733 - DNA, 42 bp, Emericella nidulans
gttctcgagacgagcgatcgccaaaacccccgcagcatggtc

SEQ ID NO: 38734 - DNA, 41 bp, Emericella nidulans
gaattcactgcggccgccatgtcccccagactgtagaggtg

SEQ ID NO: 38735 - DNA, 41 bp, Emericella nidulans
gttctcgagacgagcgatcgcacaaagctccagttctgcat

SEQ ID NO: 38736 - DNA, 41 bp, Emericella nidulans
gaattcactgcggccgccatgccagcgaccaagcttctcta

SEQ ID NO: 38737 - DNA, 42 bp, Emericella nidulans
gttctcgagacgagcgatcgctggtgaggcttgtgtagagtc

SEQ ID NO: 38738 - DNA, 41 bp, Emericella nidulans
gaattcactgcggccgccatgcatggtgctcaagcagactc

SEQ ID NO: 38739 - DNA, 41 bp, Emericella nidulans
gttctcgagacgagcgatcgcagattcatggccctttgatg

SEQ ID NO: 38740 - DNA, 41 bp, Emericella nidulans
gaattcactgcggccgccatggcaggtagagtttgccaagg

SEQ ID NO: 38741 - DNA, 41 bp, Emericella nidulans
gttctcgagacgagcgatcgctctcggtggtacttgctgtg

SEQ ID NO: 38742 - DNA, 41 bp, Emericella nidulans
gaattcactgcggccgccatgccgtcacgcactcccccaac

SEQ ID NO: 38743 - DNA, 43 bp, Emericella nidulans
gttctcgagacgagcgatcgcgaattcgcctctcagcgcctca

SEQ ID NO: 38744 - DNA, 41 bp, Emericella nidulans
gaattcactgcggccgccatgagaggcgcgatggagcgatg

SEQ ID NO: 38745 - DNA, 46 bp, Emericella nidulans
gttctcgagacgagcgatcgcttgacccgtggatcttgatcggaca

SEQ ID NO: 38746 - DNA, 41 bp, Emericella nidulans
gaattcactgcggccgccatgaagcaaaccgcgccttcgac

SEQ ID NO: 38747 - DNA, 49 bp, Emericella nidulans
gttctcgagacgagcgatcgcaccgaaatcagagaatagaaactgcacc

SEQ ID NO: 38748 - DNA, 41 bp, Emericella nidulans
gaattcactgcggccgccatgatcaatgtgctaagcgtgga

SEQ ID NO: 38749 - DNA, 41 bp, Emericella nidulans
gttctcgagacgagcgatcgcatttacgagcgtgtgctgct

SEQ ID NO: 38750 - DNA, 42 bp, Emericella nidulans
gaattcactgcggccgccatggcgatgccgacaatgcctctg

SEQ ID NO: 38751 - DNA, 47 bp, Emericella nidulans
gttctcgagacgagcgatcgcctcctttgcctcggtctttgtaagca

SEQ ID NO: 38752 - DNA, 41 bp, Emericella nidulans
gaattcactgcggccgccatgcggacaggagtgtacagcaa

SEQ ID NO: 38753 - DNA, 41 bp, Emericella nidulans
gttctcgagacgagcgatcgcgctgttgagtaaagcatgga

SEQ ID NO: 38754 - DNA, 41 bp, Emericella nidulans
gaattcactgcggccgccatggccggacaagataccgataa

SEQ ID NO: 38755 - DNA, 41 bp, Emericella nidulans
gttctcgagacgagcgatcgcctcaagcacaggacggattt

SEQ ID NO: 38756 - DNA, 41 bp, Emericella nidulans
gaattcactgcggccgccatgtgcctatctgcaaggacgat

SEQ ID NO: 38757 - DNA, 47 bp, Emericella nidulans
gttctcgagacgagcgatcgccgcttttgattcatactatgtacgtt

SEQ ID NO: 38758 - DNA, 48 bp, Emericella nidulans
gaattcactgcggccgccatgtggggttagaagaaaatctccatgaaa

SEQ ID NO: 38759 - DNA, 49 bp, Emericella nidulans
gttctcgagacgagcgatcgctacttttggtaacctaattgcaggggtt

SEQ ID NO: 38760 - DNA, 47 bp, Emericella nidulans
gaattcactgcggccgccatgtggctacaacctcagcccatttaccc

SEQ ID NO: 38761 - DNA, 48 bp, Emericella nidulans
gttctcgagacgagcgatcgctgagaaagaaggattgttgttgcaagg

SEQ ID NO: 38762 - DNA, 41 bp, Emericella nidulans
gaattcactgcggccgccatggagacgcccccgtcaagcag

SEQ ID NO: 38763 - DNA, 49 bp, Emericella nidulans
gttctcgagacgagcgatcgcattcatgggaagcttcacatcaacaccc

SEQ ID NO: 38764 - DNA, 40 bp, Emericella nidulans
gaattcactgcggccgccatgcaaccagcctcgcccatcg

SEQ ID NO: 38765 - DNA, 49 bp, Emericella nidulans
gttctcgagacgagcgatcgctttttggtgatcgcctcaatctcttctg

SEQ ID NO: 38766 - DNA, 41 bp, Emericella nidulans
gaattcactgcggccgccatggttcgctatggaacaaccgt

SEQ ID NO: 38767 - DNA, 45 bp, Emericella nidulans
gttctcgagacgagcgatcgctagatatctacgtcattcttgtcg

SEQ ID NO: 38768 - DNA, 41 bp, Emericella nidulans
gaattcactgcggccgccatgtacggacctgcagagtgttc

SEQ ID NO: 38769 - DNA, 45 bp, Emericella nidulans
gttctcgagacgagcgatcgcgcaccttcttctctatgtctgagg

SEQ ID NO: 38770 - DNA, 41 bp, Emericella nidulans
gaattcactgcggccgccatgccgctttccatggcctcctt

SEQ ID NO: 38771 - DNA, 41 bp, Emericella nidulans
gttctcgagacgagcgatcgcccgcgaccgcttgaagaaga

SEQ ID NO: 38772 - DNA, 49 bp, Emericella nidulans
gaattcactgcggccgccatggactcttcccaatgacctgtaaactacg

SEQ ID NO: 38773 - DNA, 41 bp, Emericella nidulans
gttctcgagacgagcgatcgcaagcagcggtacgtgcgtgt

SEQ ID NO: 38774 - DNA, 41 bp, Emericella nidulans
gaattcactgcggccgccatgtgcagaggaggccggttcca

SEQ ID NO: 38775 - DNA, 49 bp, Emericella nidulans
gttctcgagacgagcgatcgccgttagcatagagcgcatacgagtcagc

SEQ ID NO: 38776 - DNA, 41 bp, Emericella nidulans
gaattcactgcggccgccatgttcagacctcgcaagctgtt

SEQ ID NO: 38777 - DNA, 42 bp, Emericella nidulans
gttctcgagacgagcgatcgcgcagcatcaaaattgcgaata

SEQ ID NO: 38778 - DNA, 48 bp, Emericella nidulans
gaattcactgcggccgccatggcggggatgtatatatgaacacacagg

SEQ ID NO: 38779 - DNA, 46 bp, Emericella nidulans
gttctcgagacgagcgatcgcgcctggaataaggcacgtctagaaa

SEQ ID NO: 38780 - DNA, 40 bp, Emericella nidulans
gaattcactgcggccgccatgccccaatgtactggggagt

SEQ ID NO: 38781 - DNA, 41 bp, Emericella nidulans
gttctcgagacgagcgatcgcggtgaaagggctacagatgg

SEQ ID NO: 38782 - DNA, 44 bp, Emericella nidulans
gaattcactgcggccgccatgcctggaaaaccttcggacttcaa

SEQ ID NO: 38783 - DNA, 46 bp, Emericella nidulans
gttctcgagacgagcgatcgcagttcctggtttgcagaacgtatcg

SEQ ID NO: 38784 - DNA, 48 bp, Emericella nidulans
gaattcactgcggccgccatgtcctaatgaatggccctaaccccgaac

SEQ ID NO: 38785 - DNA, 48 bp, Emericella nidulans
gttctcgagacgagcgatcgctgcgatagcctgtcaatcatcaactcg

SEQ ID NO: 38786 - DNA, 47 bp, Emericella nidulans
gaattcactgcggccgccatgcggctggatatactgtcagcgacctg

SEQ ID NO: 38787 - DNA, 44 bp, Emericella nidulans
gttctcgagacgagcgatcgcgatccgatgtcgcgaacttgctc

SEQ ID NO: 38788 - DNA, 43 bp, Emericella nidulans
gaattcactgcggccgccatgcgtccgcaatcaagatggtctc

SEQ ID NO: 38789 - DNA, 46 bp, Emericella nidulans
gttctcgagacgagcgatcgcagtgccggtacttccaaaaccacca

SEQ ID NO: 38790 - DNA, 47 bp, Emericella nidulans
gaattcactgcggccgccatgcggattcttctcccgccttaaggata

SEQ ID NO: 38791 - DNA, 41 bp, Emericella nidulans
gttctcgagacgagcgatcgctgccgttgcatcagccatga

SEQ ID NO: 38792 - DNA, 41 bp, Emericella nidulans
gaattcactgcggccgccatgcagcaagttcggaaagtcgt

SEQ ID NO: 38793 - DNA, 42 bp, Emericella nidulans
gttctcgagacgagcgatcgcgctgtttttctgcttatgaaa

SEQ ID NO: 38794 - DNA, 46 bp, Emericella nidulans
gaattcactgcggccgccatgtcctcttgtcatatctactcatcca

SEQ ID NO: 38795 - DNA, 40 bp, Emericella nidulans
gttctcgagacgagcgatcgccgagaccactgaggaaagg

SEQ ID NO: 38796 - DNA, 45 bp, Emericella nidulans
gaattcactgcggccgccatgagttatcctcccatcaagcccaaa

SEQ ID NO: 38797 - DNA, 41 bp, Emericella nidulans
gttctcgagacgagcgatcgcttcttcgcaaacccggagca

SEQ ID NO: 38798 - DNA, 43 bp, Emericella nidulans
gaattcactgcggccgccatgaactgacggaacgcaagaagga

SEQ ID NO: 38799 - DNA, 49 bp, Emericella nidulans
gttctcgagacgagcgatcgcagggatatcgaaaacaggcttgagcttc

SEQ ID NO: 38800 - DNA, 41 bp, Emericella nidulans
gaattcactgcggccgccatgcggatgtcgtcatcaacaac

SEQ ID NO: 38801 - DNA, 41 bp, Emericella nidulans
gttctcgagacgagcgatcgcctttgaactcgtgcgaactg

SEQ ID NO: 38802 - DNA, 41 bp, Emericella nidulans
gaattcactgcggccgccatggggtgagccggtcagcgttt

SEQ ID NO: 38803 - DNA, 46 bp, Emericella nidulans
gttctcgagacgagcgatcgcatatgcctagagcagcggcatcttc

SEQ ID NO: 38804 - DNA, 41 bp, Emericella nidulans
gaattcactgcggccgccatgaacgacggcgggtttcccac

SEQ ID NO: 38805 - DNA, 40 bp, Emericella nidulans
gttctcgagacgagcgatcgccgtgattgcgcccgtgcat

SEQ ID NO: 38806 - DNA, 49 bp, Emericella nidulans
gaattcactgcggccgccatgtgtacctaacgaacgattggggccggta

SEQ ID NO: 38807 - DNA, 48 bp, Emericella nidulans
gttctcgagacgagcgatcgcgtcgttgtagaagtggacgatggtagg

SEQ ID NO: 38808 - DNA, 49 bp, Emericella nidulans
gaattcactgcggccgccatggaggataccttctggttgcttgtctcca

SEQ ID NO: 38809 - DNA, 47 bp, Emericella nidulans
gttctcgagacgagcgatcgcgctacaacatctccggcctaaccaca

SEQ ID NO: 38810 - DNA, 41 bp, Emericella nidulans
gaattcactgcggccgccatgtgcctacccgtctctctaag

SEQ ID NO: 38811 - DNA, 41 bp, Emericella nidulans
gttctcgagacgagcgatcgcccagcctccttgatcttctg

SEQ ID NO: 38812 - DNA, 41 bp, Emericella nidulans
gaattcactgcggccgccatgacaaccaagcggacattgat

SEQ ID NO: 38813 - DNA, 41 bp, Emericella nidulans
gttctcgagacgagcgatcgcgcgaaaccgctgtagacata

SEQ ID NO: 38814 - DNA, 41 bp, Emericella nidulans
gaattcactgcggccgccatggacgtcggtcacatcaacac

SEQ ID NO: 38815 - DNA, 42 bp, Emericella nidulans
gttctcgagacgagcgatcgcgctgatcatgttgacaagtgc

SEQ ID NO: 38816 - DNA, 41 bp, Emericella nidulans
gaattcactgcggccgccatgggcttcgttcgtcctggtca

SEQ ID NO: 38817 - DNA, 48 bp, Emericella nidulans
gttctcgagacgagcgatcgctttctacttcaatcccccagctagcaa

SEQ ID NO: 38818 - DNA, 49 bp, Emericella nidulans
gaattcactgcggccgccatgtgacgacaatggtattatggtactgggt

SEQ ID NO: 38819 - DNA, 45 bp, Emericella nidulans
gttctcgagacgagcgatcgccaattcgtcgaacggtctcagggt

SEQ ID NO: 38820 - DNA, 41 bp, Emericella nidulans
gaattcactgcggccgccatgatcccgatcaagcttttgaa

SEQ ID NO: 38821 - DNA, 41 bp, Emericella nidulans
gttctcgagacgagcgatcgcgccctgacggacacttttac

SEQ ID NO: 38822 - DNA, 41 bp, Emericella nidulans
gaattcactgcggccgccatgaagttcggaaaggcatggtt

SEQ ID NO: 38823 - DNA, 41 bp, Emericella nidulans
gttctcgagacgagcgatcgcactcgcatgcagaaagacag

SEQ ID NO: 38824 - DNA, 43 bp, Emericella nidulans
gaattcactgcggccgccatgcctcagcgatggatgatgggac

SEQ ID NO: 38825 - DNA, 49 bp, Emericella nidulans
gttctcgagacgagcgatcgcccctaaacctgaaagtcggattgacacg

SEQ ID NO: 38826 - DNA, 48 bp, Emericella nidulans
gaattcactgcggccgccatgtgccctcggtatttcttggtctactcc

SEQ ID NO: 38827 - DNA, 41 bp, Emericella nidulans
gttctcgagacgagcgatcgccagcggcgttacccagaggg

SEQ ID NO: 38828 - DNA, 47 bp, Emericella nidulans
gaattcactgcggccgccatgtcgataacccaagatctgagacagca

SEQ ID NO: 38829 - DNA, 48 bp, Emericella nidulans
gttctcgagacgagcgatcgcctcccgggctgtcttcgcagagatact

SEQ ID NO: 38830 - DNA, 41 bp, Emericella nidulans
gaattcactgcggccgccatggcttcgcgtcaaaaataagc

SEQ ID NO: 38831 - DNA, 40 bp, Emericella nidulans
gttctcgagacgagcgatcgccgtaaccagcgttgagagc

SEQ ID NO: 38832 - DNA, 42 bp, Emericella nidulans
gaattcactgcggccgccatgacgcaaccccgcagagaattg

SEQ ID NO: 38833 - DNA, 47 bp, Emericella nidulans
gttctcgagacgagcgatcgcgcacaacaaatccaaagcctgccaac

SEQ ID NO: 38834 - DNA, 41 bp, Emericella nidulans
gaattcactgcggccgccatgtcctctccatgggctgtatc

SEQ ID NO: 38835 - DNA, 41 bp, Emericella nidulans
gttctcgagacgagcgatcgcgccctcccagatgacattag

SEQ ID NO: 38836 - DNA, 49 bp, Emericella nidulans
gaattcactgcggccgccatgcccattctacaaggtgaagatagtccag

SEQ ID NO: 38837 - DNA, 49 bp, Emericella nidulans
gttctcgagacgagcgatcgcttccgacgaagaaagagctctgcccaac

SEQ ID NO: 38838 - DNA, 41 bp, Emericella nidulans
gaattcactgcggccgccatgtcggacttttgcggcgatgg

SEQ ID NO: 38839 - DNA, 41 bp, Emericella nidulans
gttctcgagacgagcgatcgcgccgcggtctgatgcagatg

SEQ ID NO: 38840 - DNA, 49 bp, Emericella nidulans
gaattcactgcggccgccatgatcatgcgttttaccaacattcttctgc

SEQ ID NO: 38841 - DNA, 42 bp, Emericella nidulans
gttctcgagacgagcgatcgcccgacctgccaatgaatacca

SEQ ID NO: 38842 - DNA, 41 bp, Emericella nidulans
gaattcactgcggccgccatgagatgccctgttcaatgtcc

SEQ ID NO: 38843 - DNA, 41 bp, Emericella nidulans
gttctcgagacgagcgatcgcccttttgaagcaccgaatgt

SEQ ID NO: 38844 - DNA, 45 bp, Emericella nidulans
gaattcactgcggccgccatgaggagcagaaagcatcgaccctga

SEQ ID NO: 38845 - DNA, 45 bp, Emericella nidulans
gttctcgagacgagcgatcgcgttttaccgcttcctgtggctccc

SEQ ID NO: 38846 - DNA, 41 bp, Emericella nidulans
gaattcactgcggccgccatgcaggattctacgccgatctc

SEQ ID NO: 38847 - DNA, 41 bp, Emericella nidulans
gttctcgagacgagcgatcgcacgcgctaaagaaccacatt

SEQ ID NO: 38848 - DNA, 41 bp, Emericella nidulans
gaattcactgcggccgccatgtccgctcaaacggcgaaagc

SEQ ID NO: 38849 - DNA, 43 bp, Emericella nidulans
gttctcgagacgagcgatcgccccagcttgtgggtcacccttg

SEQ ID NO: 38850 - DNA, 48 bp, Emericella nidulans
gaattcactgcggccgccatggtttcttgacattatcccaagctaaca

SEQ ID NO: 38851 - DNA, 41 bp, Emericella nidulans
gttctcgagacgagcgatcgctgagttgggcttcaaatcct

SEQ ID NO: 38852 - DNA, 41 bp, Emericella nidulans
gaattcactgcggccgccatgagctttggccatgcagttac

SEQ ID NO: 38853 - DNA, 41 bp, Emericella nidulans
gttctcgagacgagcgatcgcgctgctgacggtgattgaag

SEQ ID NO: 38854 - DNA, 49 bp, Emericella nidulans
gaattcactgcggccgccatgccatcatgagatcaacaaccagccgaaa

SEQ ID NO: 38855 - DNA, 46 bp, Emericella nidulans
gttctcgagacgagcgatcgcctcaggaggattccctattccttgc

SEQ ID NO: 38856 - DNA, 40 bp, Emericella nidulans
gaattcactgcggccgccatggaggcggatgcaagatgta

SEQ ID NO: 38857 - DNA, 44 bp, Emericella nidulans
gttctcgagacgagcgatcgcactttcgttatctggtagctgag

SEQ ID NO: 38858 - DNA, 45 bp, Emericella nidulans
gaattcactgcggccgccatggttatacactgaagccacggagcc

SEQ ID NO: 38859 - DNA, 49 bp, Emericella nidulans
gttctcgagacgagcgatcgcgacccatggattatacacataccgactg

SEQ ID NO: 38860 - DNA, 42 bp, Emericella nidulans
gaattcactgcggccgccatgtggtgcaaaaaggcatgttcc

SEQ ID NO: 38861 - DNA, 42 bp, Emericella nidulans
gttctcgagacgagcgatcgcgcggcgtcataatccggcaac

SEQ ID NO: 38862 - DNA, 41 bp, Emericella nidulans
gaattcactgcggccgccatgtctctcccaccgctacaaat

SEQ ID NO: 38863 - DNA, 41 bp, Emericella nidulans
gttctcgagacgagcgatcgcacactagcccagggaggaag

SEQ ID NO: 38864 - DNA, 46 bp, Emericella nidulans
gaattcactgcggccgccatgactcgggttctcatccatgatgtcg

SEQ ID NO: 38865 - DNA, 44 bp, Emericella nidulans
gttctcgagacgagcgatcgcggaggatgggaggtggttaggga

SEQ ID NO: 38866 - DNA, 43 bp, Emericella nidulans
gaattcactgcggccgccatggcatgatgctaatggattgttc

SEQ ID NO: 38867 - DNA, 40 bp, Emericella nidulans
gttctcgagacgagcgatcgcgttacgggatgctccacct

SEQ ID NO: 38868 - DNA, 41 bp, Emericella nidulans
gaattcactgcggccgccatgggcccgtgaggctgtccaga

SEQ ID NO: 38869 - DNA, 47 bp, Emericella nidulans
gttctcgagacgagcgatcgccagacgctcaaagtagccctcgctct

SEQ ID NO: 38870 - DNA, 49 bp, Emericella nidulans
gaattcactgcggccgccatgatcggtctttgactaacgtcctgtttgg

SEQ ID NO: 38871 - DNA, 46 bp, Emericella nidulans
gttctcgagacgagcgatcgcgaggtttgctttgatggctgcagaa

SEQ ID NO: 38872 - DNA, 41 bp, Emericella nidulans
gaattcactgcggccgccatgttcaacgaaaaggaatttgc

SEQ ID NO: 38873 - DNA, 43 bp, Emericella nidulans
gttctcgagacgagcgatcgcgtcgacttcaattgtctgatcg

SEQ ID NO: 38874 - DNA, 40 bp, Emericella nidulans
gaattcactgcggccgccatgactccacccggcgagcacc

SEQ ID NO: 38875 - DNA, 44 bp, Emericella nidulans
gttctcgagacgagcgatcgctgctgcatgcaaatcttgaccgt

SEQ ID NO: 38876 - DNA, 41 bp, Emericella nidulans
gaattcactgcggccgccatgttgcaagcccaaccgactcc

SEQ ID NO: 38877 - DNA, 47 bp, Emericella nidulans
gttctcgagacgagcgatcgccggattttcgaacaagctgaatgacc

SEQ ID NO: 38878 - DNA, 48 bp, Emericella nidulans
gaattcactgcggccgccatgtttttaaggctgccggtttattcccac

SEQ ID NO: 38879 - DNA, 47 bp, Emericella nidulans
gttctcgagacgagcgatcgctgccttttaggttttccagtgacctg

SEQ ID NO: 38880 - DNA, 47 bp, Emericella nidulans
gaattcactgcggccgccatgctttggacaaaaacgaccaccgagga

SEQ ID NO: 38881 - DNA, 48 bp, Emericella nidulans
gttctcgagacgagcgatcgcaccaggctcaactcataagccagttcg

SEQ ID NO: 38882 - DNA, 48 bp, Emericella nidulans
gaattcactgcggccgccatgttgaccagaatatgctgaacactgtcg

SEQ ID NO: 38883 - DNA, 49 bp, Emericella nidulans
gttctcgagacgagcgatcgcttgaaggtattgacttacgtggggctga

SEQ ID NO: 38884 - DNA, 44 bp, Emericella nidulans
gaattcactgcggccgccatgctggatttcatgaaagacaccct

SEQ ID NO: 38885 - DNA, 42 bp, Emericella nidulans
gttctcgagacgagcgatcgccggttcatctggttcatcatt

SEQ ID NO: 38886 - DNA, 42 bp, Emericella nidulans
gaattcactgcggccgccatgacggtatcaaagcgcgtgtcg

SEQ ID NO: 38887 - DNA, 44 bp, Emericella nidulans
gttctcgagacgagcgatcgcgctccacaccgacactaggaccc

SEQ ID NO: 38888 - DNA, 43 bp, Emericella nidulans
gaattcactgcggccgccatgtgatatcctcgcgcagatgttt

SEQ ID NO: 38889 - DNA, 41 bp, Emericella nidulans
gttctcgagacgagcgatcgcgaaggacgtactttgctccc

SEQ ID NO: 38890 - DNA, 45 bp, Emericella nidulans
gaattcactgcggccgccatgctcttggacctcttgccctcttcg

SEQ ID NO: 38891 - DNA, 44 bp, Emericella nidulans
gttctcgagacgagcgatcgccgaagccgtctgtgttgtgacca

SEQ ID NO: 38892 - DNA, 42 bp, Emericella nidulans
gaattcactgcggccgccatgccgtgctgaatggtgccctgt

SEQ ID NO: 38893 - DNA, 41 bp, Emericella nidulans
gttctcgagacgagcgatcgcggccagggcttgcgtagctc

SEQ ID NO: 38894 - DNA, 42 bp, Emericella nidulans
gaattcactgcggccgccatgccaatgtctctctgtttagcg

SEQ ID NO: 38895 - DNA, 41 bp, Emericella nidulans
gttctcgagacgagcgatcgccctcgctcaattttcctcag

SEQ ID NO: 38896 - DNA, 42 bp, Emericella nidulans
gaattcactgcggccgccatggctctagccatctcgcactaa

SEQ ID NO: 38897 - DNA, 41 bp, Emericella nidulans
gttctcgagacgagcgatcgcaaataaaaacctgccggtcc

SEQ ID NO: 38898 - DNA, 45 bp, Emericella nidulans
gaattcactgcggccgccatgagacgccgctgtttatgacggata

SEQ ID NO: 38899 - DNA, 41 bp, Emericella nidulans
gttctcgagacgagcgatcgcgcgcacgaagggctgtgctc

SEQ ID NO: 38900 - DNA, 48 bp, Emericella nidulans
gaattcactgcggccgccatgaggtgttatccaagatactttcaaatc

SEQ ID NO: 38901 - DNA, 47 bp, Emericella nidulans
gttctcgagacgagcgatcgcagaaaagaaggactttcgtaatcttg

SEQ ID NO: 38902 - DNA, 45 bp, Emericella nidulans
gaattcactgcggccgccatgtctgggttatgaagggggtgttcc

SEQ ID NO: 38903 - DNA, 42 bp, Emericella nidulans
gttctcgagacgagcgatcgcccggagcagtagccgaccttc

SEQ ID NO: 38904 - DNA, 49 bp, Emericella nidulans
gaattcactgcggccgccatgcaaacgatgaaagtgaagatgacgctta

SEQ ID NO: 38905 - DNA, 47 bp, Emericella nidulans
gttctcgagacgagcgatcgcaaggtctccgctgtcatcggcctgta

SEQ ID NO: 38906 - DNA, 47 bp, Emericella nidulans
gaattcactgcggccgccatgtcgaacgcttcgtcctatctataccg

SEQ ID NO: 38907 - DNA, 45 bp, Emericella nidulans
gttctcgagacgagcgatcgccagacgcgcactttaccctcctca

SEQ ID NO: 38908 - DNA, 43 bp, Emericella nidulans
gaattcactgcggccgccatgccggccagttcaacgaatcgag

SEQ ID NO: 38909 - DNA, 43 bp, Emericella nidulans
gttctcgagacgagcgatcgctcgcccgctcagtctgagtctt

SEQ ID NO: 38910 - DNA, 43 bp, Emericella nidulans
gaattcactgcggccgccatgcgcagacagctaagtccgcctc

SEQ ID NO: 38911 - DNA, 47 bp, Emericella nidulans
gttctcgagacgagcgatcgcgacacactgcgagtagtaggggttca

SEQ ID NO: 38912 - DNA, 45 bp, Emericella nidulans
gaattcactgcggccgccatgtgaaccacttctgtcgccattgtg

SEQ ID NO: 38913 - DNA, 43 bp, Emericella nidulans
gttctcgagacgagcgatcgcgattcccacgctcaggtacagc

SEQ ID NO: 38914 - DNA, 43 bp, Emericella nidulans
gaattcactgcggccgccatgtggtgcaagcctgtttggtagc

SEQ ID NO: 38915 - DNA, 41 bp, Emericella nidulans
gttctcgagacgagcgatcgcactgcacgccagcccattcc

SEQ ID NO: 38916 - DNA, 49 bp, Emericella nidulans
gaattcactgcggccgccatgagattgaattccgtttcttttccgcaca

SEQ ID NO: 38917 - DNA, 42 bp, Emericella nidulans
gttctcgagacgagcgatcgctgttcttcgccctctgcttca

SEQ ID NO: 38918 - DNA, 42 bp, Emericella nidulans
gaattcactgcggccgccatggcatccgactggagtgccaga

SEQ ID NO: 38919 - DNA, 41 bp, Emericella nidulans
gttctcgagacgagcgatcgcgcccgtccccttgacccatt

SEQ ID NO: 38920 - DNA, 42 bp, Emericella nidulans
gaattcactgcggccgccatgaggtttgcgacgcagaacagg

SEQ ID NO: 38921 - DNA, 44 bp, Emericella nidulans
gttctcgagacgagcgatcgcgggctcgaatagttgtggcttca

SEQ ID NO: 38922 - DNA, 42 bp, Emericella nidulans
gaattcactgcggccgccatgccccgagcgtgtgatgtatgc

SEQ ID NO: 38923 - DNA, 40 bp, Emericella nidulans
gttctcgagacgagcgatcgcccgaacggcgtgggcactt

SEQ ID NO: 38924 - DNA, 43 bp, Emericella nidulans
gaattcactgcggccgccatggcgattgagatcccaagccaga

SEQ ID NO: 38925 - DNA, 41 bp, Emericella nidulans
gttctcgagacgagcgatcgctagtccgcgcctggctaccg

SEQ ID NO: 38926 - DNA, 41 bp, Emericella nidulans
gaattcactgcggccgccatgcgcttgcgccgcttttcctt

SEQ ID NO: 38927 - DNA, 47 bp, Emericella nidulans
gttctcgagacgagcgatcgcgtacttgcggatctggatgaagttgg

SEQ ID NO: 38928 - DNA, 49 bp, Emericella nidulans
gaattcactgcggccgccatgaaaaacggatatagaaacaagcggtctc

SEQ ID NO: 38929 - DNA, 47 bp, Emericella nidulans
gttctcgagacgagcgatcgcaatatccacaattccacccgtgatcc

SEQ ID NO: 38930 - DNA, 45 bp, Emericella nidulans
gaattcactgcggccgccatggaaaaattctccgagacgctggaa

SEQ ID NO: 38931 - DNA, 46 bp, Emericella nidulans
gttctcgagacgagcgatcgcataatttgggaaagcccgccggatg

SEQ ID NO: 38932 - DNA, 39 bp, Emericella nidulans
gaattcactgcggccgccatgcgagcgtcccactggaat

SEQ ID NO: 38933 - DNA, 48 bp, Emericella nidulans
gttctcgagacgagcgatcgcatataggttaaagggacctcgaagtaa

SEQ ID NO: 38934 - DNA, 41 bp, Emericella nidulans
gaattcactgcggccgccatgtaactacccacaggctgaaa

SEQ ID NO: 38935 - DNA, 39 bp, Emericella nidulans
gttctcgagacgagcgatcgccgctggatgaatgtgtcg

SEQ ID NO: 38936 - DNA, 41 bp, Emericella nidulans
gaattcactgcggccgccatgaaccaaagtcggactggaag

SEQ ID NO: 38937 - DNA, 45 bp, Emericella nidulans
gttctcgagacgagcgatcgcgttcttatatagaccgcctagcct

SEQ ID NO: 38938 - DNA, 43 bp, Emericella nidulans
gaattcactgcggccgccatgtcaatgatgaaaacagccagtc

SEQ ID NO: 38939 - DNA, 43 bp, Emericella nidulans
gttctcgagacgagcgatcgcaaagtcttgcaggattctttct

SEQ ID NO: 38940 - DNA, 41 bp, Emericella nidulans
gaattcactgcggccgccatgaaaaactcctaccggaacca

SEQ ID NO: 38941 - DNA, 39 bp, Emericella nidulans
gttctcgagacgagcgatcgcgtctggtggctgcctctg

SEQ ID NO: 38942 - DNA, 44 bp, Emericella nidulans
gaattcactgcggccgccatgctccaccgcaacacaaccacttc

SEQ ID NO: 38943 - DNA, 41 bp, Emericella nidulans
gttctcgagacgagcgatcgccgaccccgtccccgtcaact

SEQ ID NO: 38944 - DNA, 44 bp, Emericella nidulans
gaattcactgcggccgccatggcaaagacttgccgagcgcctct

SEQ ID NO: 38945 - DNA, 49 bp, Emericella nidulans
gttctcgagacgagcgatcgcccgcgagagattatctacctctgagtcg

SEQ ID NO: 38946 - DNA, 40 bp, Emericella nidulans
gaattcactgcggccgccatgctacacctccctcggcttc

SEQ ID NO: 38947 - DNA, 41 bp, Emericella nidulans
gttctcgagacgagcgatcgcggctgggaaagagtaggtcc

SEQ ID NO: 38948 - DNA, 47 bp, Emericella nidulans
gaattcactgcggccgccatgccatccatctcactctcgaactcagc

SEQ ID NO: 38949 - DNA, 49 bp, Emericella nidulans
gttctcgagacgagcgatcgcaacttctacctcggactgatgcccatgc

SEQ ID NO: 38950 - DNA, 44 bp, Emericella nidulans
gaattcactgcggccgccatgcggcctccagcacaaacatacca

SEQ ID NO: 38951 - DNA, 46 bp, Emericella nidulans
gttctcgagacgagcgatcgcatctgcgagtcgtttctgatcttga

SEQ ID NO: 38952 - DNA, 45 bp, Emericella nidulans
gaattcactgcggccgccatgcacgatttgacgcatatcgacgag

SEQ ID NO: 38953 - DNA, 45 bp, Emericella nidulans
gttctcgagacgagcgatcgctatattcccagccattcccatgaa

SEQ ID NO: 38954 - DNA, 42 bp, Emericella nidulans
gaattcactgcggccgccatgatgaagctcgttcggtgcgta

SEQ ID NO: 38955 - DNA, 41 bp, Emericella nidulans
gttctcgagacgagcgatcgctctgggtccaccgcgaccac

SEQ ID NO: 38956 - DNA, 42 bp, Emericella nidulans
gaattcactgcggccgccatgcctgcccgacaagatcctctg

SEQ ID NO: 38957 - DNA, 43 bp, Emericella nidulans
gttctcgagacgagcgatcgcgagcaggcagctttacctcgaa

SEQ ID NO: 38958 - DNA, 41 bp, Emericella nidulans
gaattcactgcggccgccatggatcagagcacagcatcagc

SEQ ID NO: 38959 - DNA, 39 bp, Emericella nidulans
gttctcgagacgagcgatcgcgccacaaatgacggatcg

SEQ ID NO: 38960 - DNA, 40 bp, Emericella nidulans
gaattcactgcggccgccatgcaaattcagtcaccggcac

SEQ ID NO: 38961 - DNA, 41 bp, Emericella nidulans
gttctcgagacgagcgatcgctatcaagagcacccggtttt

SEQ ID NO: 38962 - DNA, 41 bp, Emericella nidulans
gaattcactgcggccgccatgccgcccatgcgatgcttcag

SEQ ID NO: 38963 - DNA, 49 bp, Emericella nidulans
gttctcgagacgagcgatcgctccacaaaccaaagtcttgtacatatcg

SEQ ID NO: 38964 - DNA, 41 bp, Emericella nidulans
gaattcactgcggccgccatgaggcatggattgtggtccta

SEQ ID NO: 38965 - DNA, 49 bp, Emericella nidulans
gttctcgagacgagcgatcgctctttctaattatagtaatctgccctgt

SEQ ID NO: 38966 - DNA, 41 bp, Emericella nidulans
gaattcactgcggccgccatgcggccgggccatcttcttct

SEQ ID NO: 38967 - DNA, 48 bp, Emericella nidulans
gttctcgagacgagcgatcgcaagtaggcgtcttccttctctgcatcc

SEQ ID NO: 38968 - DNA, 41 bp, Emericella nidulans
gaattcactgcggccgccatgggtacgttaccccttgttga

SEQ ID NO: 38969 - DNA, 41 bp, Emericella nidulans
gttctcgagacgagcgatcgcttcaacctcctctcctcacg

SEQ ID NO: 38970 - DNA, 48 bp, Emericella nidulans
gaattcactgcggccgccatgacctacatgattcctgcagtatggcta

SEQ ID NO: 38971 - DNA, 49 bp, Emericella nidulans
gttctcgagacgagcgatcgcaatatcgacagccatgattgggccctga

SEQ ID NO: 38972 - DNA, 44 bp, Emericella nidulans
gaattcactgcggccgccatggttaccattgtggttgaacactt

SEQ ID NO: 38973 - DNA, 48 bp, Emericella nidulans
gttctcgagacgagcgatcgcaaaaagatcctcaatacttttctcagc

SEQ ID NO: 38974 - DNA, 43 bp, Emericella nidulans
gaattcactgcggccgccatgtcgaaagacgcagctctgaacg

SEQ ID NO: 38975 - DNA, 49 bp, Emericella nidulans
gttctcgagacgagcgatcgcgacctttatccgctcatacgaagccaaa

SEQ ID NO: 38976 - DNA, 41 bp, Emericella nidulans
gaattcactgcggccgccatggccgggtacgacgccttcaa

SEQ ID NO: 38977 - DNA, 41 bp, Emericella nidulans
gttctcgagacgagcgatcgcgctcccatttgccgctcgtg

SEQ ID NO: 38978 - DNA, 48 bp, Emericella nidulans
gaattcactgcggccgccatggtgctaatcctcgtaagcatggcgaac

SEQ ID NO: 38979 - DNA, 45 bp, Emericella nidulans
gttctcgagacgagcgatcgcctagttcgggcacgacaaatcgaa

SEQ ID NO: 38980 - DNA, 48 bp, Emericella nidulans
gaattcactgcggccgccatgcgtgcatcaacatggaatggtatatgg

SEQ ID NO: 38981 - DNA, 42 bp, Emericella nidulans
gttctcgagacgagcgatcgcccgcaaatgacgtggacagaa

SEQ ID NO: 38982 - DNA, 46 bp, Emericella nidulans
gaattcactgcggccgccatggccaatttgtgtcgcaaatcaaacc

SEQ ID NO: 38983 - DNA, 44 bp, Emericella nidulans
gttctcgagacgagcgatcgctgcgaaccctgaagttgggctga

SEQ ID NO: 38984 - DNA, 41 bp, Emericella nidulans
gaattcactgcggccgccatgcccgggggaccgagtaagga

SEQ ID NO: 38985 - DNA, 46 bp, Emericella nidulans
gttctcgagacgagcgatcgcttgagccagagccgtggctttgatg

SEQ ID NO: 38986 - DNA, 49 bp, Emericella nidulans
gaattcactgcggccgccatgctcatcactgtttcttcctcggggctgt

SEQ ID NO: 38987 - DNA, 42 bp, Emericella nidulans
gttctcgagacgagcgatcgctggggccaatcccattgaagc

SEQ ID NO: 38988 - DNA, 41 bp, Emericella nidulans
gaattcactgcggccgccatgctgcatcctcaactccgaat

SEQ ID NO: 38989 - DNA, 39 bp, Emericella nidulans
gttctcgagacgagcgatcgcagtcgattccgcgggaga

SEQ ID NO: 38990 - DNA, 41 bp, Emericella nidulans
gaattcactgcggccgccatgggcatgtgcctgcagtgtat

SEQ ID NO: 38991 - DNA, 41 bp, Emericella nidulans
gttctcgagacgagcgatcgccaccattcttcccttctcca

SEQ ID NO: 38992 - DNA, 41 bp, Emericella nidulans
gaattcactgcggccgccatgcacctcgccaagtccggaga

SEQ ID NO: 38993 - DNA, 42 bp, Emericella nidulans
gttctcgagacgagcgatcgctccagggcaacctggatgacg

SEQ ID NO: 38994 - DNA, 45 bp, Emericella nidulans
gaattcactgcggccgccatgtctgcagttcgcattacaggaggc

SEQ ID NO: 38995 - DNA, 48 bp, Emericella nidulans
gttctcgagacgagcgatcgctcaagaagaccacagtatcttggcgta

SEQ ID NO: 38996 - DNA, 49 bp, Emericella nidulans
gaattcactgcggccgccatgcaataaaaacaagaagctcgtctccgta

SEQ ID NO: 38997 - DNA, 49 bp, Emericella nidulans
gttctcgagacgagcgatcgcacatacgatcagtaaatatccgctttgg

SEQ ID NO: 38998 - DNA, 43 bp, Emericella nidulans
gaattcactgcggccgccatgcccggcataagaccgactaccg

SEQ ID NO: 38999 - DNA, 41 bp, Emericella nidulans
gttctcgagacgagcgatcgcgctggaagggagcgggctgt

SEQ ID NO: 39000 - DNA, 47 bp, Emericella nidulans
gaattcactgcggccgccatgtgaaagaagactcgccattgaaagca

SEQ ID NO: 39001 - DNA, 44 bp, Emericella nidulans
gttctcgagacgagcgatcgcgagtctacggactctcgggctcc

SEQ ID NO: 39002 - DNA, 41 bp, Emericella nidulans
gaattcactgcggccgccatgggcggacgaccggtgttgtt

SEQ ID NO: 39003 - DNA, 49 bp, Emericella nidulans
gttctcgagacgagcgatcgcactggttacttggatatttgaacccctc

SEQ ID NO: 39004 - DNA, 41 bp, Emericella nidulans
gaattcactgcggccgccatggtggctcatggaccggggtt

SEQ ID NO: 39005 - DNA, 49 bp, Emericella nidulans
gttctcgagacgagcgatcgccagtcgtatcattgatcagagacgcaaa

SEQ ID NO: 39006 - DNA, 47 bp, Emericella nidulans
gaattcactgcggccgccatgatgatatctgagcaagcgtctgtccc

SEQ ID NO: 39007 - DNA, 49 bp, Emericella nidulans
gttctcgagacgagcgatcgcgtcagacgaaatagaaccgagttcttcg

SEQ ID NO: 39008 - DNA, 49 bp, Emericella nidulans
gaattcactgcggccgccatgtattgaatgggtatacattcacaataac

SEQ ID NO: 39009 - DNA, 41 bp, Emericella nidulans
gttctcgagacgagcgatcgctttgagcttcagcaccttca

SEQ ID NO: 39010 - DNA, 43 bp, Emericella nidulans
gaattcactgcggccgccatgtgccatgaaaagcatgtaaaac

SEQ ID NO: 39011 - DNA, 49 bp, Emericella nidulans
gttctcgagacgagcgatcgcattctagatctcttactaagctttaacc

SEQ ID NO: 39012 - DNA, 41 bp, Emericella nidulans
gaattcactgcggccgccatgggctggtgcgggtacaggga

SEQ ID NO: 39013 - DNA, 41 bp, Emericella nidulans
gttctcgagacgagcgatcgcaggtgccagcccactgaacg

SEQ ID NO: 39014 - DNA, 49 bp, Emericella nidulans
gaattcactgcggccgccatgtgagcttacctgctataatcgctacacc

SEQ ID NO: 39015 - DNA, 49 bp, Emericella nidulans
gttctcgagacgagcgatcgctcaccaaaatacctgaaattggccctta

SEQ ID NO: 39016 - DNA, 41 bp, Emericella nidulans
gaattcactgcggccgccatgggatgccggcatgagtgtct

SEQ ID NO: 39017 - DNA, 49 bp, Emericella nidulans
gttctcgagacgagcgatcgccttatactttccctcacagtcctgtccc

SEQ ID NO: 39018 - DNA, 43 bp, Emericella nidulans
gaattcactgcggccgccatgtcccgctcaagagcgccttcta

SEQ ID NO: 39019 - DNA, 45 bp, Emericella nidulans
gttctcgagacgagcgatcgcgcatcaggcagtaaacagcgagaa

SEQ ID NO: 39020 - DNA, 45 bp, Emericella nidulans
gaattcactgcggccgccatggagaacggggaaccggttacttca

SEQ ID NO: 39021 - DNA, 45 bp, Emericella nidulans
gttctcgagacgagcgatcgcgcccatcatacctgccaagtttcc

SEQ ID NO: 39022 - DNA, 41 bp, Emericella nidulans
gaattcactgcggccgccatgtgatgcgcggaggatgtcca

SEQ ID NO: 39023 - DNA, 41 bp, Emericella nidulans
gttctcgagacgagcgatcgcgccagcttcttcggcgtcgt

SEQ ID NO: 39024 - DNA, 49 bp, Emericella nidulans
gaattcactgcggccgccatgacaagatgacacccctgtcactatatcc

SEQ ID NO: 39025 - DNA, 47 bp, Emericella nidulans
gttctcgagacgagcgatcgcgtccgtaatctgctcgaccggctgaa

SEQ ID NO: 39026 - DNA, 42 bp, Emericella nidulans
gaattcactgcggccgccatgtcaaccgtcgcaccctgttcc

SEQ ID NO: 39027 - DNA, 49 bp, Emericella nidulans
gttctcgagacgagcgatcgcaacaggacgatcaagataacaaggatga

SEQ ID NO: 39028 - DNA, 42 bp, Emericella nidulans
gaattcactgcggccgccatgggtggacttcgtattgcgatt

SEQ ID NO: 39029 - DNA, 41 bp, Emericella nidulans
gttctcgagacgagcgatcgctaaatgcgtcactcctgctg

SEQ ID NO: 39030 - DNA, 41 bp, Emericella nidulans
gaattcactgcggccgccatgcatcctcagccctgacttct

SEQ ID NO: 39031 - DNA, 44 bp, Emericella nidulans
gttctcgagacgagcgatcgctccttgccctagaatttatctca

SEQ ID NO: 39032 - DNA, 41 bp, Emericella nidulans
gaattcactgcggccgccatggttaaacaacgcctgctggt

SEQ ID NO: 39033 - DNA, 41 bp, Emericella nidulans
gttctcgagacgagcgatcgccctgtcacaccccgttagta

SEQ ID NO: 39034 - DNA, 48 bp, Emericella nidulans
gaattcactgcggccgccatgagctgggctctgatgtcctaggggaat

SEQ ID NO: 39035 - DNA, 49 bp, Emericella nidulans
gttctcgagacgagcgatcgcgtcgtccagctgctgatatgttaagtcg

SEQ ID NO: 39036 - DNA, 43 bp, Emericella nidulans
gaattcactgcggccgccatggcgctgagataagggatgctca

SEQ ID NO: 39037 - DNA, 46 bp, Emericella nidulans
gttctcgagacgagcgatcgccttcttcctatccggttccggttct

SEQ ID NO: 39038 - DNA, 41 bp, Emericella nidulans
gaattcactgcggccgccatgccttgtcttttcccaccaga

SEQ ID NO: 39039 - DNA, 41 bp, Emericella nidulans
gttctcgagacgagcgatcgcgtcatgtaggcttccacagc

SEQ ID NO: 39040 - DNA, 41 bp, Emericella nidulans
gaattcactgcggccgccatgcgccttcgcgtcgcgtatct

SEQ ID NO: 39041 - DNA, 49 bp, Emericella nidulans
gttctcgagacgagcgatcgcatcaagagcatgaataaaatcggagtgg

SEQ ID NO: 39042 - DNA, 41 bp, Emericella nidulans
gaattcactgcggccgccatgtccgcttcaaagccagatag

SEQ ID NO: 39043 - DNA, 41 bp, Emericella nidulans
gttctcgagacgagcgatcgcaaaactgcccttgacaccac

SEQ ID NO: 39044 - DNA, 41 bp, Emericella nidulans
gaattcactgcggccgccatgcctcctccaacccacgctcc

SEQ ID NO: 39045 - DNA, 41 bp, Emericella nidulans
gttctcgagacgagcgatcgccggcaaaagccgcaaccaca

SEQ ID NO: 39046 - DNA, 46 bp, Emericella nidulans
gaattcactgcggccgccatgcaatccttccacagcttgcttctcc

SEQ ID NO: 39047 - DNA, 48 bp, Emericella nidulans
gttctcgagacgagcgatcgccttgcggtaaaacttactctccaccca

SEQ ID NO: 39048 - DNA, 41 bp, Emericella nidulans
gaattcactgcggccgccatggcgagttctcgttctgcttt

SEQ ID NO: 39049 - DNA, 39 bp, Emericella nidulans
gttctcgagacgagcgatcgcccaggtgcactgggacat

SEQ ID NO: 39050 - DNA, 47 bp, Emericella nidulans
gaattcactgcggccgccatggaggtatcatcggtgacgaaatgggt

SEQ ID NO: 39051 - DNA, 48 bp, Emericella nidulans
gttctcgagacgagcgatcgctaacgtgccaagacgcattgggaagac

SEQ ID NO: 39052 - DNA, 41 bp, Emericella nidulans
gaattcactgcggccgccatgtgttgccagcaactcctatg

SEQ ID NO: 39053 - DNA, 41 bp, Emericella nidulans
gttctcgagacgagcgatcgctcttgcttctggtcatgctg

SEQ ID NO: 39054 - DNA, 44 bp, Emericella nidulans
gaattcactgcggccgccatggaagcacccctctagccgcccta

SEQ ID NO: 39055 - DNA, 49 bp, Emericella nidulans
gttctcgagacgagcgatcgcctccttcagggccttgatggcctgactt

SEQ ID NO: 39056 - DNA, 41 bp, Emericella nidulans
gaattcactgcggccgccatgtggcgatgagccgaacgatg

SEQ ID NO: 39057 - DNA, 49 bp, Emericella nidulans
gttctcgagacgagcgatcgcgagtgttggtacagagtcctctgtggat

SEQ ID NO: 39058 - DNA, 47 bp, Emericella nidulans
gaattcactgcggccgccatgtcaggctgtcctcaacttctctaccg

SEQ ID NO: 39059 - DNA, 41 bp, Emericella nidulans
gttctcgagacgagcgatcgctggccaggcctgccagtttc

SEQ ID NO: 39060 - DNA, 43 bp, Emericella nidulans
gaattcactgcggccgccatgcgaactggtactctgccgtgcc

SEQ ID NO: 39061 - DNA, 44 bp, Emericella nidulans
gttctcgagacgagcgatcgccagcttagccttgggcttcagca

SEQ ID NO: 39062 - DNA, 41 bp, Emericella nidulans
gaattcactgcggccgccatgtccgagactgttatcggagg

SEQ ID NO: 39063 - DNA, 41 bp, Emericella nidulans
gttctcgagacgagcgatcgctttcgggactgaaggatagg

SEQ ID NO: 39064 - DNA, 41 bp, Emericella nidulans
gaattcactgcggccgccatgtggtcaacgcctacttttcc

SEQ ID NO: 39065 - DNA, 47 bp, Emericella nidulans
gttctcgagacgagcgatcgcgaaaggtatcgagtaattgaacagtg

SEQ ID NO: 39066 - DNA, 43 bp, Emericella nidulans
gaattcactgcggccgccatgccatctccgttggtatggttgg

SEQ ID NO: 39067 - DNA, 42 bp, Emericella nidulans
gttctcgagacgagcgatcgcgccgtgctgtaaaccgcccta

SEQ ID NO: 39068 - DNA, 43 bp, Emericella nidulans
gaattcactgcggccgccatgtttttctcttgcattctcaagg

SEQ ID NO: 39069 - DNA, 41 bp, Emericella nidulans
gttctcgagacgagcgatcgcataccgaactcgacgcaaac

SEQ ID NO: 39070 - DNA, 44 bp, Emericella nidulans
gaattcactgcggccgccatgatgcgaggtagaggactaataac

SEQ ID NO: 39071 - DNA, 41 bp, Emericella nidulans
gttctcgagacgagcgatcgcaggaggttgctgctggtaga

SEQ ID NO: 39072 - DNA, 43 bp, Emericella nidulans
gaattcactgcggccgccatgcacgagtcccgccagatcacac

SEQ ID NO: 39073 - DNA, 47 bp, Emericella nidulans
gttctcgagacgagcgatcgccaggaagtagtctggggtacgtctcg

SEQ ID NO: 39074 - DNA, 43 bp, Emericella nidulans
gaattcactgcggccgccatgcggagctgacggtttcgaagga

SEQ ID NO: 39075 - DNA, 42 bp, Emericella nidulans
gttctcgagacgagcgatcgcgcctgatagtcccgcagatgg

SEQ ID NO: 39076 - DNA, 41 bp, Emericella nidulans
gaattcactgcggccgccatggatccaggggctaccaaaac

SEQ ID NO: 39077 - DNA, 45 bp, Emericella nidulans
gttctcgagacgagcgatcgcagccaatataagcagttaagaagc

SEQ ID NO: 39078 - DNA, 41 bp, Emericella nidulans
gaattcactgcggccgccatgccgcgcatgagcgatttcaa

SEQ ID NO: 39079 - DNA, 41 bp, Emericella nidulans
gttctcgagacgagcgatcgccccgagtcacatcggcaccc

SEQ ID NO: 39080 - DNA, 43 bp, Emericella nidulans
gaattcactgcggccgccatgctgcgaaggccaatccttctct

SEQ ID NO: 39081 - DNA, 42 bp, Emericella nidulans
gttctcgagacgagcgatcgccacctgcaatgcgctcggtta

SEQ ID NO: 39082 - DNA, 45 bp, Emericella nidulans
gaattcactgcggccgccatgaatgctccctttcgacgatattcc

SEQ ID NO: 39083 - DNA, 49 bp, Emericella nidulans
gttctcgagacgagcgatcgcgttggccttctccagcttactcaaaaca

SEQ ID NO: 39084 - DNA, 41 bp, Emericella nidulans
gaattcactgcggccgccatggcagaacctcaagttcctca

SEQ ID NO: 39085 - DNA, 40 bp, Emericella nidulans
gttctcgagacgagcgatcgccgtcttcgttgctgttgct

SEQ ID NO: 39086 - DNA, 41 bp, Emericella nidulans
gaattcactgcggccgccatgtcgctgcgtcctgggaagtg

SEQ ID NO: 39087 - DNA, 41 bp, Emericella nidulans
gttctcgagacgagcgatcgcgcgacgggacgacccattca

SEQ ID NO: 39088 - DNA, 41 bp, Emericella nidulans
gaattcactgcggccgccatggcgtcggcaaggagggtgtt

SEQ ID NO: 39089 - DNA, 41 bp, Emericella nidulans
gttctcgagacgagcgatcgcccaccgccgggaaggatacc

SEQ ID NO: 39090 - DNA, 39 bp, Emericella nidulans
gaattcactgcggccgccatgggataaggagcaggctgt

SEQ ID NO: 39091 - DNA, 42 bp, Emericella nidulans
gttctcgagacgagcgatcgcgggccttcttgttagacttgg

SEQ ID NO: 39092 - DNA, 45 bp, Emericella nidulans
gaattcactgcggccgccatggagccatctccccttcagcgtcgt

SEQ ID NO: 39093 - DNA, 41 bp, Emericella nidulans
gttctcgagacgagcgatcgccccatgtctccggccagctt

SEQ ID NO: 39094 - DNA, 44 bp, Emericella nidulans
gaattcactgcggccgccatgtgagaggaccgtgcggtctaagg

SEQ ID NO: 39095 - DNA, 48 bp, Emericella nidulans
gttctcgagacgagcgatcgcggacagtgaaacgttcgttgcccagaa

SEQ ID NO: 39096 - DNA, 47 bp, Emericella nidulans
gaattcactgcggccgccatgcttcactaaacccagcaagcggatca

SEQ ID NO: 39097 - DNA, 41 bp, Emericella nidulans
gttctcgagacgagcgatcgccgagccttcttccgggatgc

SEQ ID NO: 39098 - DNA, 45 bp, Emericella nidulans
gaattcactgcggccgccatggtctggtgaaccacttcgtcactg

SEQ ID NO: 39099 - DNA, 41 bp, Emericella nidulans
gttctcgagacgagcgatcgcgcgctcaatgtcctccttgg

SEQ ID NO: 39100 - DNA, 42 bp, Emericella nidulans
gaattcactgcggccgccatggcaatggctccgagaggctga

SEQ ID NO: 39101 - DNA, 41 bp, Emericella nidulans
gttctcgagacgagcgatcgcccggggtccgagtgagacca

SEQ ID NO: 39102 - DNA, 41 bp, Emericella nidulans
gaattcactgcggccgccatggtcttgttggccaggagaag

SEQ ID NO: 39103 - DNA, 43 bp, Emericella nidulans
gttctcgagacgagcgatcgctgcaactttaacattgatctga

SEQ ID NO: 39104 - DNA, 44 bp, Emericella nidulans
gaattcactgcggccgccatgctcggtttgaaggtgctccacga

SEQ ID NO: 39105 - DNA, 42 bp, Emericella nidulans
gttctcgagacgagcgatcgccgctctgggcacccaagatga

SEQ ID NO: 39106 - DNA, 41 bp, Emericella nidulans
gaattcactgcggccgccatgctttacgttgcagccacact

SEQ ID NO: 39107 - DNA, 45 bp, Emericella nidulans
gttctcgagacgagcgatcgccagtatcatgaccttttacatcaa

SEQ ID NO: 39108 - DNA, 48 bp, Emericella nidulans
gaattcactgcggccgccatggctatttcatcaaggcgttctcagcct

SEQ ID NO: 39109 - DNA, 41 bp, Emericella nidulans
gttctcgagacgagcgatcgccggtcacctcgcctccgaaa

SEQ ID NO: 39110 - DNA, 41 bp, Emericella nidulans
gaattcactgcggccgccatggaagccctcccggtcgaaaa

SEQ ID NO: 39111 - DNA, 42 bp, Emericella nidulans
gttctcgagacgagcgatcgctgggcactttgccggaatcct

SEQ ID NO: 39112 - DNA, 43 bp, Emericella nidulans
gaattcactgcggccgccatgatgccaccccaaatcaaacagg

SEQ ID NO: 39113 - DNA, 43 bp, Emericella nidulans
gttctcgagacgagcgatcgctaatgttggggtcagcgggtgg

SEQ ID NO: 39114 - DNA, 44 bp, Emericella nidulans
gaattcactgcggccgccatgaaacactcctgcgaacctgctga

SEQ ID NO: 39115 - DNA, 49 bp, Emericella nidulans
gttctcgagacgagcgatcgcccatgtccctaaaagggagtgttaaaga

SEQ ID NO: 39116 - DNA, 49 bp, Emericella nidulans
gaattcactgcggccgccatgattcgatttgaagacaacacaagcgaca

SEQ ID NO: 39117 - DNA, 45 bp, Emericella nidulans
gttctcgagacgagcgatcgctgaagacgttctccttgacgaagc

SEQ ID NO: 39118 - DNA, 43 bp, Emericella nidulans
gaattcactgcggccgccatgcgaaacgcaaagcatcggaacc

SEQ ID NO: 39119 - DNA, 47 bp, Emericella nidulans
gttctcgagacgagcgatcgcaagttggagatctccccctttaccca

SEQ ID NO: 39120 - DNA, 42 bp, Emericella nidulans
gaattcactgcggccgccatgtccgaattccactgcccacga

SEQ ID NO: 39121 - DNA, 44 bp, Emericella nidulans
gttctcgagacgagcgatcgcttctcagtctccgatgctgatgg

SEQ ID NO: 39122 - DNA, 45 bp, Emericella nidulans
gaattcactgcggccgccatgcaccgacttacatctggtctaaaa

SEQ ID NO: 39123 - DNA, 48 bp, Emericella nidulans
gttctcgagacgagcgatcgctacatgaaggtccaaaatttgggtaga

SEQ ID NO: 39124 - DNA, 48 bp, Emericella nidulans
gaattcactgcggccgccatgatcccagttggtaagcaagccttaact

SEQ ID NO: 39125 - DNA, 44 bp, Emericella nidulans
gttctcgagacgagcgatcgctcggttcccccttgtccattttg

SEQ ID NO: 39126 - DNA, 44 bp, Emericella nidulans
gaattcactgcggccgccatgcggcgttacccagctattgcatc

SEQ ID NO: 39127 - DNA, 41 bp, Emericella nidulans
gttctcgagacgagcgatcgccgccagcgtctgagcaaact

SEQ ID NO: 39128 - DNA, 45 bp, Emericella nidulans
gaattcactgcggccgccatggactactgcgcgccaggcatggaa

SEQ ID NO: 39129 - DNA, 42 bp, Emericella nidulans
gttctcgagacgagcgatcgccgtgaatatcgccgacctgga

SEQ ID NO: 39130 - DNA, 46 bp, Emericella nidulans
gaattcactgcggccgccatgtggggatttaagatttgcgctctcg

SEQ ID NO: 39131 - DNA, 41 bp, Emericella nidulans
gttctcgagacgagcgatcgctgcggcttcggcaacgctat

SEQ ID NO: 39132 - DNA, 41 bp, Emericella nidulans
gaattcactgcggccgccatggcctgattttgagtgggtcc

SEQ ID NO: 39133 - DNA, 41 bp, Emericella nidulans
gttctcgagacgagcgatcgcaccgtacagagcgacaaacc

SEQ ID NO: 39134 - DNA, 41 bp, Emericella nidulans
gaattcactgcggccgccatgcatatggaatgggcgtctct

SEQ ID NO: 39135 - DNA, 48 bp, Emericella nidulans
gttctcgagacgagcgatcgcatgtgaaccaatgtaaattaatgtgag

SEQ ID NO: 39136 - DNA, 47 bp, Emericella nidulans
gaattcactgcggccgccatggctaagggatcatgctgattccaaca

SEQ ID NO: 39137 - DNA, 48 bp, Emericella nidulans
gttctcgagacgagcgatcgcagaacagcatcctgatctgttagttgc

SEQ ID NO: 39138 - DNA, 42 bp, Emericella nidulans
gaattcactgcggccgccatggagcgcgcacaatatgcgtta

SEQ ID NO: 39139 - DNA, 43 bp, Emericella nidulans
gttctcgagacgagcgatcgccatgccgcttctcttgacttgg

SEQ ID NO: 39140 - DNA, 40 bp, Emericella nidulans
gaattcactgcggccgccatggtgcgggccagacagtacc

SEQ ID NO: 39141 - DNA, 41 bp, Emericella nidulans
gttctcgagacgagcgatcgccaccttgagctcaatctccc

SEQ ID NO: 39142 - DNA, 41 bp, Emericella nidulans
gaattcactgcggccgccatggttgccgacgcgcaggaagt

SEQ ID NO: 39143 - DNA, 45 bp, Emericella nidulans
gttctcgagacgagcgatcgctgcacatccttatcaaggcagacg

SEQ ID NO: 39144 - DNA, 45 bp, Emericella nidulans
gaattcactgcggccgccatggaatactggccgcttctgcccttt

SEQ ID NO: 39145 - DNA, 41 bp, Emericella nidulans
gttctcgagacgagcgatcgccccatttccccaaggaagca

SEQ ID NO: 39146 - DNA, 40 bp, Emericella nidulans
gaattcactgcggccgccatgaaccaggcaacacacaagc

SEQ ID NO: 39147 - DNA, 41 bp, Emericella nidulans
gttctcgagacgagcgatcgcagttctcaatggccttgtcg

SEQ ID NO: 39148 - DNA, 49 bp, Emericella nidulans
gaattcactgcggccgccatgaaaaagaaattatcttcttaccttaatc

SEQ ID NO: 39149 - DNA, 42 bp, Emericella nidulans
gttctcgagacgagcgatcgctgctgcccacaatatgttaaa

SEQ ID NO: 39150 - DNA, 41 bp, Emericella nidulans
gaattcactgcggccgccatgtttccggaggcggattctcg

SEQ ID NO: 39151 - DNA, 49 bp, Emericella nidulans
gttctcgagacgagcgatcgccaactctcttgccactttcaccagcgta

SEQ ID NO: 39152 - DNA, 47 bp, Emericella nidulans
gaattcactgcggccgccatgctcaaggacgtcaacctcgacatcaa

SEQ ID NO: 39153 - DNA, 41 bp, Emericella nidulans
gttctcgagacgagcgatcgcgcagcccagcctccttgaca

SEQ ID NO: 39154 - DNA, 45 bp, Emericella nidulans
gaattcactgcggccgccatggagggggtctcatgacgatggcta

SEQ ID NO: 39155 - DNA, 49 bp, Emericella nidulans
gttctcgagacgagcgatcgcaacaaagtacttccatgccgagtcttca

SEQ ID NO: 39156 - DNA, 44 bp, Emericella nidulans
gaattcactgcggccgccatgcggaatccaaaagctttataacc

SEQ ID NO: 39157 - DNA, 39 bp, Emericella nidulans
gttctcgagacgagcgatcgccgcttggaaggagcactg

SEQ ID NO: 39158 - DNA, 41 bp, Emericella nidulans
gaattcactgcggccgccatggcatgcaccggatggttgga

SEQ ID NO: 39159 - DNA, 41 bp, Emericella nidulans
gttctcgagacgagcgatcgcgcggccagctggatcctctc

SEQ ID NO: 39160 - DNA, 43 bp, Emericella nidulans
gaattcactgcggccgccatggccgagtcaggacaaacggtcc

SEQ ID NO: 39161 - DNA, 41 bp, Emericella nidulans
gttctcgagacgagcgatcgcctgctgctcgcccgtgctct

SEQ ID NO: 39162 - DNA, 41 bp, Emericella nidulans
gaattcactgcggccgccatggggcaccgcacaccagtgac

SEQ ID NO: 39163 - DNA, 46 bp, Emericella nidulans
gttctcgagacgagcgatcgcaatggaaaaagcaacggcatcagtg

SEQ ID NO: 39164 - DNA, 47 bp, Emericella nidulans
gaattcactgcggccgccatgcaagcgtgagaaaggtaggtagtgct

SEQ ID NO: 39165 - DNA, 41 bp, Emericella nidulans
gttctcgagacgagcgatcgctccagccagccagcatctca

SEQ ID NO: 39166 - DNA, 41 bp, Emericella nidulans
gaattcactgcggccgccatggcgcaacgcgaacaccctct

SEQ ID NO: 39167 - DNA, 42 bp, Emericella nidulans
gttctcgagacgagcgatcgcagcgtccaggcgaaggaggtc

SEQ ID NO: 39168 - DNA, 43 bp, Emericella nidulans
gaattcactgcggccgccatggaccatggctttggatggggag

SEQ ID NO: 39169 - DNA, 46 bp, Emericella nidulans
gttctcgagacgagcgatcgcgcagatcaaagtcatgaaaccatgc

SEQ ID NO: 39170 - DNA, 44 bp, Emericella nidulans
gaattcactgcggccgccatgcccacgatagttcccaacccacc

SEQ ID NO: 39171 - DNA, 49 bp, Emericella nidulans
gttctcgagacgagcgatcgcatactcactgattaccgttgcgttctct

SEQ ID NO: 39172 - DNA, 40 bp, Emericella nidulans
gaattcactgcggccgccatgcccatggtgccaggggaca

SEQ ID NO: 39173 - DNA, 42 bp, Emericella nidulans
gttctcgagacgagcgatcgctggagcgctgtagcaggtgcc

SEQ ID NO: 39174 - DNA, 49 bp, Emericella nidulans
gaattcactgcggccgccatgtcttgctaacaccctaccagtttctttg

SEQ ID NO: 39175 - DNA, 43 bp, Emericella nidulans
gttctcgagacgagcgatcgcttccaatgatgctggctgctta

SEQ ID NO: 39176 - DNA, 43 bp, Emericella nidulans
gaattcactgcggccgccatgcgttcacggactgcacgattgc

SEQ ID NO: 39177 - DNA, 41 bp, Emericella nidulans
gttctcgagacgagcgatcgccgatgccgctaatccaaagc

SEQ ID NO: 39178 - DNA, 43 bp, Emericella nidulans
gaattcactgcggccgccatggccgaaaaagcagcggaagagg

SEQ ID NO: 39179 - DNA, 41 bp, Emericella nidulans
gttctcgagacgagcgatcgcgctgcggctgcgactacgag

SEQ ID NO: 39180 - DNA, 41 bp, Emericella nidulans
gaattcactgcggccgccatgactccggcgcagatgacggt

SEQ ID NO: 39181 - DNA, 49 bp, Emericella nidulans
gttctcgagacgagcgatcgcttcttgaagagatcttcaaagagcaagg

SEQ ID NO: 39182 - DNA, 41 bp, Emericella nidulans
gaattcactgcggccgccatgcaacgccgccaggcacaata

SEQ ID NO: 39183 - DNA, 41 bp, Emericella nidulans
gttctcgagacgagcgatcgcgggcccccattgaacggaat

SEQ ID NO: 39184 - DNA, 41 bp, Emericella nidulans
gaattcactgcggccgccatgggtcccgtatccttcatcac

SEQ ID NO: 39185 - DNA, 41 bp, Emericella nidulans
gttctcgagacgagcgatcgcgttacccgtccaagggatct

SEQ ID NO: 39186 - DNA, 43 bp, Emericella nidulans
gaattcactgcggccgccatgcttcgaggagagcgtcaagtcg

SEQ ID NO: 39187 - DNA, 41 bp, Emericella nidulans
gttctcgagacgagcgatcgctggttggtggcgctctggaa

SEQ ID NO: 39188 - DNA, 46 bp, Emericella nidulans
gaattcactgcggccgccatgtctgccaaagaactcactttcaagg

SEQ ID NO: 39189 - DNA, 43 bp, Emericella nidulans
gttctcgagacgagcgatcgccaccgatcagaaggatcgcgta

SEQ ID NO: 39190 - DNA, 45 bp, Emericella nidulans
gaattcactgcggccgccatgtggagattttggatcgtctggaca

SEQ ID NO: 39191 - DNA, 49 bp, Emericella nidulans
gttctcgagacgagcgatcgccattgatatcccctttgcattcttctgc

SEQ ID NO: 39192 - DNA, 49 bp, Emericella nidulans
gaattcactgcggccgccatgcacgaagtttgcaaacataatcagtcca

SEQ ID NO: 39193 - DNA, 49 bp, Emericella nidulans
gttctcgagacgagcgatcgctaatatttgtgagagagaggtcggagca

SEQ ID NO: 39194 - DNA, 49 bp, Emericella nidulans
gaattcactgcggccgccatgctcaagcaatacttccgcaaactaccca

SEQ ID NO: 39195 - DNA, 47 bp, Emericella nidulans
gttctcgagacgagcgatcgcgaaaacttcctggcaattatccacca

SEQ ID NO: 39196 - DNA, 47 bp, Emericella nidulans
gaattcactgcggccgccatggggggagtatatactccttattctgg

SEQ ID NO: 39197 - DNA, 42 bp, Emericella nidulans
gttctcgagacgagcgatcgcgattcggaaccttacagcttg

SEQ ID NO: 39198 - DNA, 41 bp, Emericella nidulans
gaattcactgcggccgccatggccggtcattccgctccatc

SEQ ID NO: 39199 - DNA, 49 bp, Emericella nidulans
gttctcgagacgagcgatcgcggaatgagtactgaccacatatccaagc

SEQ ID NO: 39200 - DNA, 43 bp, Emericella nidulans
gaattcactgcggccgccatgagattgttgtgaacgactaccg

SEQ ID NO: 39201 - DNA, 41 bp, Emericella nidulans
gttctcgagacgagcgatcgcaagggcgatgtcatcaattc

SEQ ID NO: 39202 - DNA, 41 bp, Emericella nidulans
gaattcactgcggccgccatgggggatgggagcgatcgaga

SEQ ID NO: 39203 - DNA, 44 bp, Emericella nidulans
gttctcgagacgagcgatcgctctgctgccgtcagcatatcacc

SEQ ID NO: 39204 - DNA, 49 bp, Emericella nidulans
gaattcactgcggccgccatgtagggagaggtgtcttaatcgtcggtct

SEQ ID NO: 39205 - DNA, 44 bp, Emericella nidulans
gttctcgagacgagcgatcgcgcagtggtttttgctgcggaaga

SEQ ID NO: 39206 - DNA, 40 bp, Emericella nidulans
gaattcactgcggccgccatgatcgcccggcctgaagcaa

SEQ ID NO: 39207 - DNA, 48 bp, Emericella nidulans
gttctcgagacgagcgatcgcttcccataagtccggtctaagaaactg

SEQ ID NO: 39208 - DNA, 45 bp, Emericella nidulans
gaattcactgcggccgccatgtgcgctggaaccatttattgttga

SEQ ID NO: 39209 - DNA, 49 bp, Emericella nidulans
gttctcgagacgagcgatcgctccagatatatagaatcggacgcaggga

SEQ ID NO: 39210 - DNA, 41 bp, Emericella nidulans
gaattcactgcggccgccatgccgttgacgacttggagaat

SEQ ID NO: 39211 - DNA, 41 bp, Emericella nidulans
gttctcgagacgagcgatcgccttcgccgtcaaagcattat

SEQ ID NO: 39212 - DNA, 46 bp, Emericella nidulans
gaattcactgcggccgccatgaatgcaaaacccaaggagaatatcg

SEQ ID NO: 39213 - DNA, 42 bp, Emericella nidulans
gttctcgagacgagcgatcgcttggcaattgttgcggacaga

SEQ ID NO: 39214 - DNA, 46 bp, Emericella nidulans
gaattcactgcggccgccatggttaagcctgagatgagagcgggtg

SEQ ID NO: 39215 - DNA, 47 bp, Emericella nidulans
gttctcgagacgagcgatcgcaagctacggccagtactttcgccaat

SEQ ID NO: 39216 - DNA, 45 bp, Emericella nidulans
gaattcactgcggccgccatgtttatttatggtgcccttattctc

SEQ ID NO: 39217 - DNA, 41 bp, Emericella nidulans
gttctcgagacgagcgatcgccggggctactctgacttgac

SEQ ID NO: 39218 - DNA, 47 bp, Emericella nidulans
gaattcactgcggccgccatgaccagggctgaatacatcatacttgc

SEQ ID NO: 39219 - DNA, 49 bp, Emericella nidulans
gttctcgagacgagcgatcgctcaataacctcaatttcctcatccgaaa

SEQ ID NO: 39220 - DNA, 49 bp, Emericella nidulans
gaattcactgcggccgccatgatctcacattgttttaacttcgctgacc

SEQ ID NO: 39221 - DNA, 49 bp, Emericella nidulans
gttctcgagacgagcgatcgccttctcaccatctttcttttgccccttc

SEQ ID NO: 39222 - DNA, 49 bp, Emericella nidulans
gaattcactgcggccgccatgtgaagttggtggatgtatcggtaagtga

SEQ ID NO: 39223 - DNA, 41 bp, Emericella nidulans
gttctcgagacgagcgatcgccagggggtggtggagcgact

SEQ ID NO: 39224 - DNA, 41 bp, Emericella nidulans
gaattcactgcggccgccatgggtttgcatacccttgagga

SEQ ID NO: 39225 - DNA, 42 bp, Emericella nidulans
gttctcgagacgagcgatcgcgatgaaaggagcaagcaaaga

SEQ ID NO: 39226 - DNA, 41 bp, Emericella nidulans
gaattcactgcggccgccatgcgcaggacggacgagagcta

SEQ ID NO: 39227 - DNA, 49 bp, Emericella nidulans
gttctcgagacgagcgatcgccgtgagttctgaacttcatgaacgggta

SEQ ID NO: 39228 - DNA, 41 bp, Emericella nidulans
gaattcactgcggccgccatggcttccgccctcagccactg

SEQ ID NO: 39229 - DNA, 41 bp, Emericella nidulans
gttctcgagacgagcgatcgcaaattggacgggccggagga

SEQ ID NO: 39230 - DNA, 49 bp, Emericella nidulans
gaattcactgcggccgccatggctgataatcttcttcagccattctttg

SEQ ID NO: 39231 - DNA, 41 bp, Emericella nidulans
gttctcgagacgagcgatcgccgagggtggcacgggagttc

SEQ ID NO: 39232 - DNA, 43 bp, Emericella nidulans
gaattcactgcggccgccatggcaatatcacgtcaacctttca

SEQ ID NO: 39233 - DNA, 42 bp, Emericella nidulans
gttctcgagacgagcgatcgctccaaccaagctaccaatctg

SEQ ID NO: 39234 - DNA, 41 bp, Emericella nidulans
gaattcactgcggccgccatgggccacctgtccacccgact

SEQ ID NO: 39235 - DNA, 41 bp, Emericella nidulans
gttctcgagacgagcgatcgctccaggggctgcatggggta

SEQ ID NO: 39236 - DNA, 41 bp, Emericella nidulans
gaattcactgcggccgccatgagatctcgtcgaccgtcact

SEQ ID NO: 39237 - DNA, 40 bp, Emericella nidulans
gttctcgagacgagcgatcgccaagtctccgggaacgatt

SEQ ID NO: 39238 - DNA, 49 bp, Emericella nidulans
gaattcactgcggccgccatgtgacgtatatggctttctacggtcgcta

SEQ ID NO: 39239 - DNA, 45 bp, Emericella nidulans
gttctcgagacgagcgatcgcgaactcgatcgtgtggatgacctg

SEQ ID NO: 39240 - DNA, 48 bp, Emericella nidulans
gaattcactgcggccgccatgctcagtctcatctggagccaattcttg

SEQ ID NO: 39241 - DNA, 46 bp, Emericella nidulans
gttctcgagacgagcgatcgccaatgacaaggcattttgccggtcc

SEQ ID NO: 39242 - DNA, 41 bp, Emericella nidulans
gaattcactgcggccgccatggtgccatgtgcaatgtctct

SEQ ID NO: 39243 - DNA, 40 bp, Emericella nidulans
gttctcgagacgagcgatcgcgagcggctcgacacaatac

SEQ ID NO: 39244 - DNA, 46 bp, Emericella nidulans
gaattcactgcggccgccatgtctgcaatctcgagagtgatgatcc

SEQ ID NO: 39245 - DNA, 42 bp, Emericella nidulans
gttctcgagacgagcgatcgcgcggctaagctgccagtgcat

SEQ ID NO: 39246 - DNA, 47 bp, Emericella nidulans
gaattcactgcggccgccatgagcagactcatcctcattatcggtca

SEQ ID NO: 39247 - DNA, 44 bp, Emericella nidulans
gttctcgagacgagcgatcgctgtcaaacctgtatccgggcatt

SEQ ID NO: 39248 - DNA, 45 bp, Emericella nidulans
gaattcactgcggccgccatgtgacggactgaacatgtttgatgg

SEQ ID NO: 39249 - DNA, 47 bp, Emericella nidulans
gttctcgagacgagcgatcgcttgggtctgttacagaagacgggagg

SEQ ID NO: 39250 - DNA, 46 bp, Emericella nidulans
gaattcactgcggccgccatgaagctttacgcgcagaaacagttca

SEQ ID NO: 39251 - DNA, 41 bp, Emericella nidulans
gttctcgagacgagcgatcgcagcgccgagggaccaccagt

SEQ ID NO: 39252 - DNA, 43 bp, Emericella nidulans
gaattcactgcggccgccatgggtggtctcgtgagccatgacc

SEQ ID NO: 39253 - DNA, 49 bp, Emericella nidulans
gttctcgagacgagcgatcgcacgtaccgatatcatatcctttgccctc

SEQ ID NO: 39254 - DNA, 41 bp, Emericella nidulans
gaattcactgcggccgccatgaccttgggaattactggaca

SEQ ID NO: 39255 - DNA, 46 bp, Emericella nidulans
gttctcgagacgagcgatcgcagatatttgtcatcagctgaaaagg

SEQ ID NO: 39256 - DNA, 41 bp, Emericella nidulans
gaattcactgcggccgccatggggcgctcgaggatgtctgc

SEQ ID NO: 39257 - DNA, 48 bp, Emericella nidulans
gttctcgagacgagcgatcgcagggtcagctcgtgttcactccgaagg

SEQ ID NO: 39258 - DNA, 41 bp, Emericella nidulans
gaattcactgcggccgccatgcgccagggcccagtctcaac

SEQ ID NO: 39259 - DNA, 46 bp, Emericella nidulans
gttctcgagacgagcgatcgcccagctcgtctttgagtacgccatt

SEQ ID NO: 39260 - DNA, 49 bp, Emericella nidulans
gaattcactgcggccgccatgattttgtcggcgaggtattcctaaagtg

SEQ ID NO: 39261 - DNA, 44 bp, Emericella nidulans
gttctcgagacgagcgatcgccgtcacttgctcgttcttgttgc

SEQ ID NO: 39262 - DNA, 41 bp, Emericella nidulans
gaattcactgcggccgccatggggtgaaagtacccgtatgc

SEQ ID NO: 39263 - DNA, 45 bp, Emericella nidulans
gttctcgagacgagcgatcgcacctaatagtccgaaaataccacc

SEQ ID NO: 39264 - DNA, 44 bp, Emericella nidulans
gaattcactgcggccgccatggttggaaaactagaactccctga

SEQ ID NO: 39265 - DNA, 46 bp, Emericella nidulans
gttctcgagacgagcgatcgcctgtttaccatttagtgagaagtgg

SEQ ID NO: 39266 - DNA, 42 bp, Emericella nidulans
gaattcactgcggccgccatgccttttatgggacggcggcac

SEQ ID NO: 39267 - DNA, 41 bp, Emericella nidulans
gttctcgagacgagcgatcgcgccagcacgacgccaattcc

SEQ ID NO: 39268 - DNA, 44 bp, Emericella nidulans
gaattcactgcggccgccatgtgctgctctcttccttgctcgtc

SEQ ID NO: 39269 - DNA, 41 bp, Emericella nidulans
gttctcgagacgagcgatcgctcacgcaccggtgcttttcg

SEQ ID NO: 39270 - DNA, 41 bp, Emericella nidulans
gaattcactgcggccgccatgactaccttgctgccgggtga

SEQ ID NO: 39271 - DNA, 43 bp, Emericella nidulans
gttctcgagacgagcgatcgcccgatcaaaggcttcccgcttc

SEQ ID NO: 39272 - DNA, 43 bp, Emericella nidulans
gaattcactgcggccgccatgttttggccggctacacagtggc

SEQ ID NO: 39273 - DNA, 49 bp, Emericella nidulans
gttctcgagacgagcgatcgcatcctgattgtactcgtaccgggtctca

SEQ ID NO: 39274 - DNA, 44 bp, Emericella nidulans
gaattcactgcggccgccatgttggaactcgagtaactggtatc

SEQ ID NO: 39275 - DNA, 41 bp, Emericella nidulans
gttctcgagacgagcgatcgcgagtcttccccttggtttcc

SEQ ID NO: 39276 - DNA, 48 bp, Emericella nidulans
gaattcactgcggccgccatgattacatccctacacaatggcagacct

SEQ ID NO: 39277 - DNA, 48 bp, Emericella nidulans
gttctcgagacgagcgatcgccagtatgacagcatttaccggggtttg

SEQ ID NO: 39278 - DNA, 41 bp, Emericella nidulans
gaattcactgcggccgccatgtcccccgacccgaatgacaa

SEQ ID NO: 39279 - DNA, 41 bp, Emericella nidulans
gttctcgagacgagcgatcgccgttcccagccccgtcacag

SEQ ID NO: 39280 - DNA, 41 bp, Emericella nidulans
gaattcactgcggccgccatgatcctcgattccacgagatg

SEQ ID NO: 39281 - DNA, 41 bp, Emericella nidulans
gttctcgagacgagcgatcgctagcagccagcggtaagttt

SEQ ID NO: 39282 - DNA, 41 bp, Emericella nidulans
gaattcactgcggccgccatgccaccatcagctccgatatt

SEQ ID NO: 39283 - DNA, 41 bp, Emericella nidulans
gttctcgagacgagcgatcgcgccaatttgccaaaagatcc

SEQ ID NO: 39284 - DNA, 49 bp, Emericella nidulans
gaattcactgcggccgccatgattttcctcttctagcttttggcgtggg

SEQ ID NO: 39285 - DNA, 48 bp, Emericella nidulans
gttctcgagacgagcgatcgcgaatcgagttgaaatgcttgctggaca

SEQ ID NO: 39286 - DNA, 42 bp, Emericella nidulans
gaattcactgcggccgccatgtctcacagtctgcacgtatca

SEQ ID NO: 39287 - DNA, 41 bp, Emericella nidulans
gttctcgagacgagcgatcgcgggagtagacgtccgcaata

SEQ ID NO: 39288 - DNA, 41 bp, Emericella nidulans
gaattcactgcggccgccatgaaagggtgaagttcggatca

SEQ ID NO: 39289 - DNA, 42 bp, Emericella nidulans
gttctcgagacgagcgatcgccacgcatgaggtcatcataga

SEQ ID NO: 39290 - DNA, 49 bp, Emericella nidulans
gaattcactgcggccgccatgtgaagagatcgtaaagatccagtccacc

SEQ ID NO: 39291 - DNA, 49 bp, Emericella nidulans
gttctcgagacgagcgatcgcaaccctactaaagggatccctcggccac

SEQ ID NO: 39292 - DNA, 44 bp, Emericella nidulans
gaattcactgcggccgccatgacaacattttcgcagcccagtcc

SEQ ID NO: 39293 - DNA, 42 bp, Emericella nidulans
gttctcgagacgagcgatcgcccggctggtgtgttcccattg

SEQ ID NO: 39294 - DNA, 47 bp, Emericella nidulans
gaattcactgcggccgccatggtacgcttgttgatgagttggtcgag

SEQ ID NO: 39295 - DNA, 44 bp, Emericella nidulans
gttctcgagacgagcgatcgctccttcgttcagcatcgtcctcc

SEQ ID NO: 39296 - DNA, 41 bp, Emericella nidulans
gaattcactgcggccgccatgtgtcgctaacctggtcacag

SEQ ID NO: 39297 - DNA, 41 bp, Emericella nidulans
gttctcgagacgagcgatcgcctcatcaatctcggtgttgg

SEQ ID NO: 39298 - DNA, 39 bp, Emericella nidulans
gaattcactgcggccgccatgaagcgccaaacctgcgta

SEQ ID NO: 39299 - DNA, 41 bp, Emericella nidulans
gttctcgagacgagcgatcgccttcgtacagccatctgcaa

SEQ ID NO: 39300 - DNA, 43 bp, Emericella nidulans
gaattcactgcggccgccatgtcatccgtctcggcttcgtttg

SEQ ID NO: 39301 - DNA, 41 bp, Emericella nidulans
gttctcgagacgagcgatcgccccgcttcacgtcggaggtt

SEQ ID NO: 39302 - DNA, 41 bp, Emericella nidulans
gaattcactgcggccgccatggctaggcgtccgccttgcag

SEQ ID NO: 39303 - DNA, 41 bp, Emericella nidulans
gttctcgagacgagcgatcgccgggccttgcgctgaagaag

SEQ ID NO: 39304 - DNA, 41 bp, Emericella nidulans
gaattcactgcggccgccatgagacagccgaggaaatcaaa

SEQ ID NO: 39305 - DNA, 40 bp, Emericella nidulans
gttctcgagacgagcgatcgcctagcgcagcttcctcacc

SEQ ID NO: 39306 - DNA, 42 bp, Emericella nidulans
gaattcactgcggccgccatgccgctcacaatccgctcggta

SEQ ID NO: 39307 - DNA, 49 bp, Emericella nidulans
gttctcgagacgagcgatcgcaatctctgcacttttcgcaaacgccttg

SEQ ID NO: 39308 - DNA, 48 bp, Emericella nidulans
gaattcactgcggccgccatgcaaaacaccaagaaaattgtcgccctc

SEQ ID NO: 39309 - DNA, 40 bp, Emericella nidulans
gttctcgagacgagcgatcgccttgtgccgcggcgaggat

SEQ ID NO: 39310 - DNA, 40 bp, Emericella nidulans
gaattcactgcggccgccatggggcacgcgtgcatcgcta

SEQ ID NO: 39311 - DNA, 44 bp, Emericella nidulans
gttctcgagacgagcgatcgctcgattccggctcatcgaagaca

SEQ ID NO: 39312 - DNA, 44 bp, Emericella nidulans
gaattcactgcggccgccatgtcgccgtcaaagaagggtacagc

SEQ ID NO: 39313 - DNA, 43 bp, Emericella nidulans
gttctcgagacgagcgatcgctttccaaccaagctgctcaaca

SEQ ID NO: 39314 - DNA, 41 bp, Emericella nidulans
gaattcactgcggccgccatgcctgccgctgtattcttgat

SEQ ID NO: 39315 - DNA, 41 bp, Emericella nidulans
gttctcgagacgagcgatcgcaatctccctgtccgtcagaa

SEQ ID NO: 39316 - DNA, 44 bp, Emericella nidulans
gaattcactgcggccgccatgagtggagggcaaggcaactgaga

SEQ ID NO: 39317 - DNA, 49 bp, Emericella nidulans
gttctcgagacgagcgatcgcaagagcattagcagagagaaaagaaccc

SEQ ID NO: 39318 - DNA, 41 bp, Emericella nidulans
gaattcactgcggccgccatggcatacagccaaatgctcct

SEQ ID NO: 39319 - DNA, 41 bp, Emericella nidulans
gttctcgagacgagcgatcgcccaggattcccactgaagaa

SEQ ID NO: 39320 - DNA, 49 bp, Emericella nidulans
gaattcactgcggccgccatgcaacaatacaaacacctgctcttcttcc

SEQ ID NO: 39321 - DNA, 42 bp, Emericella nidulans
gttctcgagacgagcgatcgctcaactttgcccagcgagacc

SEQ ID NO: 39322 - DNA, 41 bp, Emericella nidulans
gaattcactgcggccgccatgtttgtgcaaggtgaagcaac

SEQ ID NO: 39323 - DNA, 44 bp, Emericella nidulans
gttctcgagacgagcgatcgcggatgtctattatttcgccatac

SEQ ID NO: 39324 - DNA, 41 bp, Emericella nidulans
gaattcactgcggccgccatggcctgcggaaaggccgttgt

SEQ ID NO: 39325 - DNA, 49 bp, Emericella nidulans
gttctcgagacgagcgatcgccgtgaagataaaacctactcgtggggag

SEQ ID NO: 39326 - DNA, 48 bp, Emericella nidulans
gaattcactgcggccgccatgttcttatgatgggcttcccatcccgta

SEQ ID NO: 39327 - DNA, 49 bp, Emericella nidulans
gttctcgagacgagcgatcgcatgtaccacctcatgagcaaagagatca

SEQ ID NO: 39328 - DNA, 49 bp, Emericella nidulans
gaattcactgcggccgccatgtttagggataccacgttcagataacagc

SEQ ID NO: 39329 - DNA, 41 bp, Emericella nidulans
gttctcgagacgagcgatcgcaggcacaggcgtggcactca

SEQ ID NO: 39330 - DNA, 41 bp, Emericella nidulans
gaattcactgcggccgccatgccccgggctgtccagggtat

SEQ ID NO: 39331 - DNA, 41 bp, Emericella nidulans
gttctcgagacgagcgatcgcccaggcgacgatgggtttgg

SEQ ID NO: 39332 - DNA, 39 bp, Emericella nidulans
gaattcactgcggccgccatggcacttcacccgcgtcat

SEQ ID NO: 39333 - DNA, 41 bp, Emericella nidulans
gttctcgagacgagcgatcgcccaatcatctccctccactt

SEQ ID NO: 39334 - DNA, 41 bp, Emericella nidulans
gaattcactgcggccgccatgtgactgcgcctttcttccta

SEQ ID NO: 39335 - DNA, 41 bp, Emericella nidulans
gttctcgagacgagcgatcgccggtaaacgctcgacttacg

SEQ ID NO: 39336 - DNA, 48 bp, Emericella nidulans
gaattcactgcggccgccatgggatatctccggcaagaagtgaaaagc

SEQ ID NO: 39337 - DNA, 49 bp, Emericella nidulans
gttctcgagacgagcgatcgccttttcttcctaagaaagtgagcgaacc

SEQ ID NO: 39338 - DNA, 41 bp, Emericella nidulans
gaattcactgcggccgccatgcgtccacgatcgcagcgaaa

SEQ ID NO: 39339 - DNA, 44 bp, Emericella nidulans
gttctcgagacgagcgatcgccgggtgactttgcctgcatttcc

SEQ ID NO: 39340 - DNA, 44 bp, Emericella nidulans
gaattcactgcggccgccatgcggaactcgttcagtcgctctcc

SEQ ID NO: 39341 - DNA, 41 bp, Emericella nidulans
gttctcgagacgagcgatcgctttgcgcatggctcgctttc

SEQ ID NO: 39342 - DNA, 41 bp, Emericella nidulans
gaattcactgcggccgccatgtcgcacaaaaccggcatgga

SEQ ID NO: 39343 - DNA, 45 bp, Emericella nidulans
gttctcgagacgagcgatcgcccgcatgtgtaactggaatcacca

SEQ ID NO: 39344 - DNA, 41 bp, Emericella nidulans
gaattcactgcggccgccatggccgagtctatcgtgctctt

SEQ ID NO: 39345 - DNA, 41 bp, Emericella nidulans
gttctcgagacgagcgatcgctcccattcgcttgttagacc

SEQ ID NO: 39346 - DNA, 43 bp, Emericella nidulans
gaattcactgcggccgccatgcgacaggatcgcgcagcttacc

SEQ ID NO: 39347 - DNA, 45 bp, Emericella nidulans
gttctcgagacgagcgatcgcagcacgcagcatatccaacatccc

SEQ ID NO: 39348 - DNA, 43 bp, Emericella nidulans
gaattcactgcggccgccatgcgcgggaaagtcctccctaaca

SEQ ID NO: 39349 - DNA, 49 bp, Emericella nidulans
gttctcgagacgagcgatcgcaaagatcattcttctctggacgtaccca

SEQ ID NO: 39350 - DNA, 46 bp, Emericella nidulans
gaattcactgcggccgccatgcacaaccgaccctgtatgcgggtat

SEQ ID NO: 39351 - DNA, 45 bp, Emericella nidulans
gttctcgagacgagcgatcgctctcactccgaagttctggcaagg

SEQ ID NO: 39352 - DNA, 43 bp, Emericella nidulans
gaattcactgcggccgccatgcgatgcttgtcttcccgttacc

SEQ ID NO: 39353 - DNA, 41 bp, Emericella nidulans
gttctcgagacgagcgatcgccgggagaggcgatctcacag

SEQ ID NO: 39354 - DNA, 41 bp, Emericella nidulans
gaattcactgcggccgccatgctcgctcagctggctttatc

SEQ ID NO: 39355 - DNA, 41 bp, Emericella nidulans
gttctcgagacgagcgatcgcgacttggcgatctttcgact

SEQ ID NO: 39356 - DNA, 49 bp, Emericella nidulans
gaattcactgcggccgccatgaaggagtggatatctcgttaatggcgta

SEQ ID NO: 39357 - DNA, 48 bp, Emericella nidulans
gttctcgagacgagcgatcgcgacatcaacgaattcagcccctttaat

SEQ ID NO: 39358 - DNA, 47 bp, Emericella nidulans
gaattcactgcggccgccatggctcctaggttcagcttgggaaaagc

SEQ ID NO: 39359 - DNA, 43 bp, Emericella nidulans
gttctcgagacgagcgatcgctgttgcccggactcagtcttcg

SEQ ID NO: 39360 - DNA, 41 bp, Emericella nidulans
gaattcactgcggccgccatggccatgggcgccttgaatga

SEQ ID NO: 39361 - DNA, 46 bp, Emericella nidulans
gttctcgagacgagcgatcgctttctttccataagcacggtcaatg

SEQ ID NO: 39362 - DNA, 45 bp, Emericella nidulans
gaattcactgcggccgccatggctaccgtctacctcctcgcagca

SEQ ID NO: 39363 - DNA, 47 bp, Emericella nidulans
gttctcgagacgagcgatcgcggcttccatttccttaccagttttgg

SEQ ID NO: 39364 - DNA, 46 bp, Emericella nidulans
gaattcactgcggccgccatgagccggtctctatgaatcgctgaca

SEQ ID NO: 39365 - DNA, 47 bp, Emericella nidulans
gttctcgagacgagcgatcgcgaaattcatcaccctcgagttggacc

SEQ ID NO: 39366 - DNA, 41 bp, Emericella nidulans
gaattcactgcggccgccatggtctggagtgcgattggtct

SEQ ID NO: 39367 - DNA, 41 bp, Emericella nidulans
gttctcgagacgagcgatcgccttcttcttgaaggcgagga

SEQ ID NO: 39368 - DNA, 47 bp, Emericella nidulans
gaattcactgcggccgccatgaaagatgcaagttgaccggtttaccc

SEQ ID NO: 39369 - DNA, 47 bp, Emericella nidulans
gttctcgagacgagcgatcgccaaaatcgccatccctctacgtctcc

SEQ ID NO: 39370 - DNA, 43 bp, Emericella nidulans
gaattcactgcggccgccatgggtgcgaaaagctgtcgcgatt

SEQ ID NO: 39371 - DNA, 47 bp, Emericella nidulans
gttctcgagacgagcgatcgcaaacttgccatgctggcgatagtcac

SEQ ID NO: 39372 - DNA, 42 bp, Emericella nidulans
gaattcactgcggccgccatgcgtgccaagggctacgtgtca

SEQ ID NO: 39373 - DNA, 45 bp, Emericella nidulans
gttctcgagacgagcgatcgcaaagctcacgcctcagctagcatc

SEQ ID NO: 39374 - DNA, 44 bp, Emericella nidulans
gaattcactgcggccgccatgggttacatccttcccggccgatt

SEQ ID NO: 39375 - DNA, 44 bp, Emericella nidulans
gttctcgagacgagcgatcgcgctcgttttcacccgacctttcg

SEQ ID NO: 39376 - DNA, 41 bp, Emericella nidulans
gaattcactgcggccgccatgttcagcacaggctctcctct

SEQ ID NO: 39377 - DNA, 41 bp, Emericella nidulans
gttctcgagacgagcgatcgcccatgtgcgataccaatcaa

SEQ ID NO: 39378 - DNA, 42 bp, Emericella nidulans
gaattcactgcggccgccatgtcgacacttcgcggccacttc

SEQ ID NO: 39379 - DNA, 45 bp, Emericella nidulans
gttctcgagacgagcgatcgctccagagctatctgctccgcatcc

SEQ ID NO: 39380 - DNA, 49 bp, Emericella nidulans
gaattcactgcggccgccatgggtcctcttgactgactcgacttgatgg

SEQ ID NO: 39381 - DNA, 42 bp, Emericella nidulans
gttctcgagacgagcgatcgccgggtgataacggagccgatg

SEQ ID NO: 39382 - DNA, 39 bp, Emericella nidulans
gaattcactgcggccgccatggccaaagccgtacagagc

SEQ ID NO: 39383 - DNA, 48 bp, Emericella nidulans
gttctcgagacgagcgatcgcatgactgtataatattaaccctaacca

SEQ ID NO: 39384 - DNA, 48 bp, Emericella nidulans
gaattcactgcggccgccatgttccggaaagagagcagctaagtatga

SEQ ID NO: 39385 - DNA, 49 bp, Emericella nidulans
gttctcgagacgagcgatcgccaggagataactgcgcttgaagtaagtg

SEQ ID NO: 39386 - DNA, 45 bp, Emericella nidulans
gaattcactgcggccgccatgagtcgatttccccctaaccgccac

SEQ ID NO: 39387 - DNA, 41 bp, Emericella nidulans
gttctcgagacgagcgatcgccttcgcggcctgtccaaacg

SEQ ID NO: 39388 - DNA, 45 bp, Emericella nidulans
gaattcactgcggccgccatgacacggggtattgctgtgttcagg

SEQ ID NO: 39389 - DNA, 41 bp, Emericella nidulans
gttctcgagacgagcgatcgcagcccgctgtccacggaatc

SEQ ID NO: 39390 - DNA, 48 bp, Emericella nidulans
gaattcactgcggccgccatggtagtagggacaacctgccgccgtcaa

SEQ ID NO: 39391 - DNA, 41 bp, Emericella nidulans
gttctcgagacgagcgatcgccccagggggtcggtatgcac

SEQ ID NO: 39392 - DNA, 41 bp, Emericella nidulans
gaattcactgcggccgccatgtgcgcctgtagggagagtgc

SEQ ID NO: 39393 - DNA, 48 bp, Emericella nidulans
gttctcgagacgagcgatcgcgcaacagcctgaacttttcctgttatg

SEQ ID NO: 39394 - DNA, 49 bp, Emericella nidulans
gaattcactgcggccgccatgctgtctgggcttcattcttcttgtagtc

SEQ ID NO: 39395 - DNA, 44 bp, Emericella nidulans
gttctcgagacgagcgatcgcgccagcctcgtagaatctctcca

SEQ ID NO: 39396 - DNA, 41 bp, Emericella nidulans
gaattcactgcggccgccatgggcttccagagcgaggaagg

SEQ ID NO: 39397 - DNA, 43 bp, Emericella nidulans
gttctcgagacgagcgatcgcttcttgctttcagggccgagat

SEQ ID NO: 39398 - DNA, 42 bp, Emericella nidulans
gaattcactgcggccgccatgggagctggacactgcattatt

SEQ ID NO: 39399 - DNA, 41 bp, Emericella nidulans
gttctcgagacgagcgatcgcggccatgaagtcccataaga

SEQ ID NO: 39400 - DNA, 41 bp, Emericella nidulans
gaattcactgcggccgccatgaccaacatgcttccgactct

SEQ ID NO: 39401 - DNA, 42 bp, Emericella nidulans
gttctcgagacgagcgatcgctctttcagtcatgcatagcaa

SEQ ID NO: 39402 - DNA, 43 bp, Emericella nidulans
gaattcactgcggccgccatggcgagtgtgagcgcaagtctgg

SEQ ID NO: 39403 - DNA, 44 bp, Emericella nidulans
gttctcgagacgagcgatcgcccacttctccctccactccttcg

SEQ ID NO: 39404 - DNA, 49 bp, Emericella nidulans
gaattcactgcggccgccatgattcaagcagcagcatatatcccgtacc

SEQ ID NO: 39405 - DNA, 49 bp, Emericella nidulans
gttctcgagacgagcgatcgcagtcggatacgtgaggaggcctggcttt

SEQ ID NO: 39406 - DNA, 48 bp, Emericella nidulans
gaattcactgcggccgccatggtaaccaggaattcttcgcctccgact

SEQ ID NO: 39407 - DNA, 44 bp, Emericella nidulans
gttctcgagacgagcgatcgcagcatcatcatggggagatagcg

SEQ ID NO: 39408 - DNA, 49 bp, Emericella nidulans
gaattcactgcggccgccatggaatatgaatggagacggcgtcgcgaaa

SEQ ID NO: 39409 - DNA, 49 bp, Emericella nidulans
gttctcgagacgagcgatcgcgcctgaatgtaattggtgttgaagtccc

SEQ ID NO: 39410 - DNA, 43 bp, Emericella nidulans
gaattcactgcggccgccatgcctacctcgagccgggcccaaa

SEQ ID NO: 39411 - DNA, 48 bp, Emericella nidulans
gttctcgagacgagcgatcgccaaactcatcgtcaaccactcccattc

SEQ ID NO: 39412 - DNA, 41 bp, Emericella nidulans
gaattcactgcggccgccatgcttcagccaggaggaagttg

SEQ ID NO: 39413 - DNA, 40 bp, Emericella nidulans
gttctcgagacgagcgatcgcctttggcaaactggcaaga

SEQ ID NO: 39414 - DNA, 44 bp, Emericella nidulans
gaattcactgcggccgccatgagccttcaaccactcccaaagca

SEQ ID NO: 39415 - DNA, 49 bp, Emericella nidulans
gttctcgagacgagcgatcgcgataaacgcctacataacaacacagcaa

SEQ ID NO: 39416 - DNA, 43 bp, Emericella nidulans
gaattcactgcggccgccatgcatcctgctggccagctatctc

SEQ ID NO: 39417 - DNA, 49 bp, Emericella nidulans
gttctcgagacgagcgatcgcatacacaaactcatcgttctcccggtct

SEQ ID NO: 39418 - DNA, 47 bp, Emericella nidulans
gaattcactgcggccgccatggctcaggacaagatggaaccctcgta

SEQ ID NO: 39419 - DNA, 49 bp, Emericella nidulans
gttctcgagacgagcgatcgctaataggaagctccgtttccaggtaatc

SEQ ID NO: 39420 - DNA, 45 bp, Emericella nidulans
gaattcactgcggccgccatggcatcctcaagatgaaccgagaaa

SEQ ID NO: 39421 - DNA, 49 bp, Emericella nidulans
gttctcgagacgagcgatcgctgcgaggtagtgggatgtgacaccgaag

SEQ ID NO: 39422 - DNA, 41 bp, Emericella nidulans
gaattcactgcggccgccatggtgttctgcgaccattcctt

SEQ ID NO: 39423 - DNA, 41 bp, Emericella nidulans
gttctcgagacgagcgatcgctttggaagcggtattcttgg

SEQ ID NO: 39424 - DNA, 45 bp, Emericella nidulans
gaattcactgcggccgccatggcggacctccagcaatctagacga

SEQ ID NO: 39425 - DNA, 44 bp, Emericella nidulans
gttctcgagacgagcgatcgcgacacgacatacggagctggtga

SEQ ID NO: 39426 - DNA, 48 bp, Emericella nidulans
gaattcactgcggccgccatgctaagttccattaatgagcgtcggcta

SEQ ID NO: 39427 - DNA, 44 bp, Emericella nidulans
gttctcgagacgagcgatcgccccccatcttgtccctgatatgg

SEQ ID NO: 39428 - DNA, 41 bp, Emericella nidulans
gaattcactgcggccgccatggctccctggcacaccgatcc

SEQ ID NO: 39429 - DNA, 41 bp, Emericella nidulans
gttctcgagacgagcgatcgcagcactgcatccgccacagc

SEQ ID NO: 39430 - DNA, 47 bp, Emericella nidulans
gaattcactgcggccgccatgaatctcctagccaagtcgcatctgga

SEQ ID NO: 39431 - DNA, 41 bp, Emericella nidulans
gttctcgagacgagcgatcgcccgccagccccaaatcagtg

SEQ ID NO: 39432 - DNA, 41 bp, Emericella nidulans
gaattcactgcggccgccatgatgatcgccggcaccctgat

SEQ ID NO: 39433 - DNA, 49 bp, Emericella nidulans
gttctcgagacgagcgatcgcaattcaaattttgaaacctcgagacaga

SEQ ID NO: 39434 - DNA, 41 bp, Emericella nidulans
gaattcactgcggccgccatgttgccccgggttcagacgaa

SEQ ID NO: 39435 - DNA, 47 bp, Emericella nidulans
gttctcgagacgagcgatcgcttatgggttctccgtcttgcagtttg

SEQ ID NO: 39436 - DNA, 41 bp, Emericella nidulans
gaattcactgcggccgccatgagcgttccccgccggtgtta

SEQ ID NO: 39437 - DNA, 48 bp, Emericella nidulans
gttctcgagacgagcgatcgctcttgctggacatcaacaaactcattg

SEQ ID NO: 39438 - DNA, 49 bp, Emericella nidulans
gaattcactgcggccgccatgaatggcgatacgctttttcctaggagtg

SEQ ID NO: 39439 - DNA, 43 bp, Emericella nidulans
gttctcgagacgagcgatcgcctcctgcatcctcatcgcatca

SEQ ID NO: 39440 - DNA, 40 bp, Emericella nidulans
gaattcactgcggccgccatggcgatcgagatctacaccc

SEQ ID NO: 39441 - DNA, 46 bp, Emericella nidulans
gttctcgagacgagcgatcgcagagtcgcacaggatattataaaca

SEQ ID NO: 39442 - DNA, 48 bp, Emericella nidulans
gaattcactgcggccgccatgatcgtctccctgtcttcactctcttca

SEQ ID NO: 39443 - DNA, 41 bp, Emericella nidulans
gttctcgagacgagcgatcgcgggtggtttgacgcgctgct

SEQ ID NO: 39444 - DNA, 44 bp, Emericella nidulans
gaattcactgcggccgccatgcctcttcccctccaagccattcc

SEQ ID NO: 39445 - DNA, 41 bp, Emericella nidulans
gttctcgagacgagcgatcgcgctgtcccgcagcacaatgc

SEQ ID NO: 39446 - DNA, 45 bp, Emericella nidulans
gaattcactgcggccgccatgattccaagtgcctttagcgtctgc

SEQ ID NO: 39447 - DNA, 40 bp, Emericella nidulans
gttctcgagacgagcgatcgcatgctcccgccctgaccac

SEQ ID NO: 39448 - DNA, 41 bp, Emericella nidulans
gaattcactgcggccgccatgccaaaaccccaaccggcaca

SEQ ID NO: 39449 - DNA, 44 bp, Emericella nidulans
gttctcgagacgagcgatcgccccttgcacaacgccttataccc

SEQ ID NO: 39450 - DNA, 43 bp, Emericella nidulans
gaattcactgcggccgccatgtcccaactccaagcaaatacgc

SEQ ID NO: 39451 - DNA, 46 bp, Emericella nidulans
gttctcgagacgagcgatcgcgagcatttccgagatgagagcatcg

SEQ ID NO: 39452 - DNA, 41 bp, Emericella nidulans
gaattcactgcggccgccatgctcgtcgctgacctgggtgc

SEQ ID NO: 39453 - DNA, 49 bp, Emericella nidulans
gttctcgagacgagcgatcgccttttcctcgttgttcaagtagcccctc

SEQ ID NO: 39454 - DNA, 49 bp, Emericella nidulans
gaattcactgcggccgccatgattcaacacatatggccgagtcttcttc

SEQ ID NO: 39455 - DNA, 46 bp, Emericella nidulans
gttctcgagacgagcgatcgcgaatggcgtacgcaataatggaagg

SEQ ID NO: 39456 - DNA, 44 bp, Emericella nidulans
gaattcactgcggccgccatggaaccatgactggcgaatcaccc

SEQ ID NO: 39457 - DNA, 43 bp, Emericella nidulans
gttctcgagacgagcgatcgcccacgctccgacaataccagca

SEQ ID NO: 39458 - DNA, 41 bp, Emericella nidulans
gaattcactgcggccgccatgtggtccgtcaagggcaagga

SEQ ID NO: 39459 - DNA, 48 bp, Emericella nidulans
gttctcgagacgagcgatcgccgtacagagcattccagcttgtaagag

SEQ ID NO: 39460 - DNA, 41 bp, Emericella nidulans
gaattcactgcggccgccatgacaatggtgcgttcaacaaa

SEQ ID NO: 39461 - DNA, 41 bp, Emericella nidulans
gttctcgagacgagcgatcgcgattgtctgcaacaccagga

SEQ ID NO: 39462 - DNA, 42 bp, Emericella nidulans
gaattcactgcggccgccatgatgcattcgttcaagcgctca

SEQ ID NO: 39463 - DNA, 49 bp, Emericella nidulans
gttctcgagacgagcgatcgcttgaaaccgtcgagaataatagaagtgc

SEQ ID NO: 39464 - DNA, 39 bp, Emericella nidulans
gaattcactgcggccgccatggaaatgttggcgcgtggc

SEQ ID NO: 39465 - DNA, 41 bp, Emericella nidulans
gttctcgagacgagcgatcgcgcccgggtgttcagggattt

SEQ ID NO: 39466 - DNA, 42 bp, Emericella nidulans
gaattcactgcggccgccatgcagcaccgccttcaaggttcg

SEQ ID NO: 39467 - DNA, 46 bp, Emericella nidulans
gttctcgagacgagcgatcgccggctctctggaacgactcggagat

SEQ ID NO: 39468 - DNA, 46 bp, Emericella nidulans
gaattcactgcggccgccatggtcctcgtaccgtttcttgtgctga

SEQ ID NO: 39469 - DNA, 48 bp, Emericella nidulans
gttctcgagacgagcgatcgccatatgcaatgacaacgtaccaacaag

SEQ ID NO: 39470 - DNA, 43 bp, Emericella nidulans
gaattcactgcggccgccatggcgtcgccaaaagatgatgagc

SEQ ID NO: 39471 - DNA, 40 bp, Emericella nidulans
gttctcgagacgagcgatcgcatgcgcagccgggcttgat

SEQ ID NO: 39472 - DNA, 47 bp, Emericella nidulans
gaattcactgcggccgccatgctacgcggtctcggtctcgaaaaccc

SEQ ID NO: 39473 - DNA, 45 bp, Emericella nidulans
gttctcgagacgagcgatcgcgaaaacattggccgagagcagagc

SEQ ID NO: 39474 - DNA, 49 bp, Emericella nidulans
gaattcactgcggccgccatggagaagtgcaaaattgtgcatacactga

SEQ ID NO: 39475 - DNA, 49 bp, Emericella nidulans
gttctcgagacgagcgatcgcagtaatgaaggttctcctctttccatcc

SEQ ID NO: 39476 - DNA, 49 bp, Emericella nidulans
gaattcactgcggccgccatgacatggcattgagtcaagagaccagagc

SEQ ID NO: 39477 - DNA, 41 bp, Emericella nidulans
gttctcgagacgagcgatcgcagggatgcaaccgacgccac

SEQ ID NO: 39478 - DNA, 39 bp, Emericella nidulans
gaattcactgcggccgccatgaatgcgagagcggttgct

SEQ ID NO: 39479 - DNA, 41 bp, Emericella nidulans
gttctcgagacgagcgatcgccggagaaactcctccctctc

SEQ ID NO: 39480 - DNA, 44 bp, Emericella nidulans
gaattcactgcggccgccatgtcggattcagcggatctatgcaa

SEQ ID NO: 39481 - DNA, 48 bp, Emericella nidulans
gttctcgagacgagcgatcgccctataacccctcctcttcagttcagg

SEQ ID NO: 39482 - DNA, 41 bp, Emericella nidulans
gaattcactgcggccgccatggctctccgtcgccaacatcg

SEQ ID NO: 39483 - DNA, 43 bp, Emericella nidulans
gttctcgagacgagcgatcgcaaccttcccaaacaccgcccta

SEQ ID NO: 39484 - DNA, 41 bp, Emericella nidulans
gaattcactgcggccgccatgggccttacgcctggcgctct

SEQ ID NO: 39485 - DNA, 49 bp, Emericella nidulans
gttctcgagacgagcgatcgcctagcctagggttgtgatgaggtgagga

SEQ ID NO: 39486 - DNA, 41 bp, Emericella nidulans
gaattcactgcggccgccatggcgcatgaaccccgaagagc

SEQ ID NO: 39487 - DNA, 43 bp, Emericella nidulans
gttctcgagacgagcgatcgcacttcgaagcggcgatgtacgg

SEQ ID NO: 39488 - DNA, 41 bp, Emericella nidulans
gaattcactgcggccgccatgctgcacagcgcgcaatcctc

SEQ ID NO: 39489 - DNA, 48 bp, Emericella nidulans
gttctcgagacgagcgatcgccaactacaaatcagcctgctcggggac

SEQ ID NO: 39490 - DNA, 41 bp, Emericella nidulans
gaattcactgcggccgccatggctaccgcgtcttctcttga

SEQ ID NO: 39491 - DNA, 39 bp, Emericella nidulans
gttctcgagacgagcgatcgcgatcgatccgccaaagag

SEQ ID NO: 39492 - DNA, 41 bp, Emericella nidulans
gaattcactgcggccgccatgtcatggtcggtttcgatatg

SEQ ID NO: 39493 - DNA, 41 bp, Emericella nidulans
gttctcgagacgagcgatcgctatcgagcatcgtctgcaag

SEQ ID NO: 39494 - DNA, 41 bp, Emericella nidulans
gaattcactgcggccgccatgatggctcgacgagaaatgac

SEQ ID NO: 39495 - DNA, 39 bp, Emericella nidulans
gttctcgagacgagcgatcgcgctcgcagtgacaggtgc

SEQ ID NO: 39496 - DNA, 44 bp, Emericella nidulans
gaattcactgcggccgccatggatgtcctcttcggcgacgtcaa

SEQ ID NO: 39497 - DNA, 45 bp, Emericella nidulans
gttctcgagacgagcgatcgccaaaagttccagcgtttcctcgac

SEQ ID NO: 39498 - DNA, 43 bp, Emericella nidulans
gaattcactgcggccgccatgcctattactattggcgacgatg

SEQ ID NO: 39499 - DNA, 41 bp, Emericella nidulans
gttctcgagacgagcgatcgccgcacttccacagtttcaga

SEQ ID NO: 39500 - DNA, 49 bp, Emericella nidulans
gaattcactgcggccgccatgaaacgagctgactccaagtctcaaaacg

SEQ ID NO: 39501 - DNA, 45 bp, Emericella nidulans
gttctcgagacgagcgatcgctgtgagccatggatgttgaagaca

SEQ ID NO: 39502 - DNA, 49 bp, Emericella nidulans
gaattcactgcggccgccatggggaattttacagatatcgagctcatcg

SEQ ID NO: 39503 - DNA, 45 bp, Emericella nidulans
gttctcgagacgagcgatcgccgggagagatggtcagttgtgtgc

SEQ ID NO: 39504 - DNA, 41 bp, Emericella nidulans
gaattcactgcggccgccatggccggtgtcgtctactacct

SEQ ID NO: 39505 - DNA, 41 bp, Emericella nidulans
gttctcgagacgagcgatcgccttcgtttgagaagccatcg

SEQ ID NO: 39506 - DNA, 49 bp, Emericella nidulans
gaattcactgcggccgccatgacaacacccttagcatctttgagtgagt

SEQ ID NO: 39507 - DNA, 49 bp, Emericella nidulans
gttctcgagacgagcgatcgcagtaaacaacaagcttgtcaatcccaga

SEQ ID NO: 39508 - DNA, 47 bp, Emericella nidulans
gaattcactgcggccgccatggcgctatacgagtcttgtcaggggat

SEQ ID NO: 39509 - DNA, 49 bp, Emericella nidulans
gttctcgagacgagcgatcgccataacataacccaccaataccaaagga

SEQ ID NO: 39510 - DNA, 48 bp, Emericella nidulans
gaattcactgcggccgccatgttccaatccgtactgacgtggttctca

SEQ ID NO: 39511 - DNA, 44 bp, Emericella nidulans
gttctcgagacgagcgatcgccaccaccgagaagagcagcgaga

SEQ ID NO: 39512 - DNA, 43 bp, Emericella nidulans
gaattcactgcggccgccatggcgatgaccccttcaacgaagc

SEQ ID NO: 39513 - DNA, 45 bp, Emericella nidulans
gttctcgagacgagcgatcgcggcaagttcctctccaattgcctc

SEQ ID NO: 39514 - DNA, 41 bp, Emericella nidulans
gaattcactgcggccgccatggcggaagaaacctggcaagc

SEQ ID NO: 39515 - DNA, 49 bp, Emericella nidulans
gttctcgagacgagcgatcgcaaccatcagagtctgtggaatattcgtt

SEQ ID NO: 39516 - DNA, 41 bp, Emericella nidulans
gaattcactgcggccgccatgctggatccggtggccctcac

SEQ ID NO: 39517 - DNA, 44 bp, Emericella nidulans
gttctcgagacgagcgatcgcgctcaagggaaaacatgcgaggc

SEQ ID NO: 39518 - DNA, 40 bp, Emericella nidulans
gaattcactgcggccgccatgcaacgaatggctcatccag

SEQ ID NO: 39519 - DNA, 41 bp, Emericella nidulans
gttctcgagacgagcgatcgcgcccaacatagggacaaaga

SEQ ID NO: 39520 - DNA, 45 bp, Emericella nidulans
gaattcactgcggccgccatgctcgacttcccggacaacaagttc

SEQ ID NO: 39521 - DNA, 49 bp, Emericella nidulans
gttctcgagacgagcgatcgcagtcaacatacatatatggccgaatccc

SEQ ID NO: 39522 - DNA, 47 bp, Emericella nidulans
gaattcactgcggccgccatgcaccgataccaggactagcccgctga

SEQ ID NO: 39523 - DNA, 48 bp, Emericella nidulans
gttctcgagacgagcgatcgcagtacgctggtcttatggcttccgtca

SEQ ID NO: 39524 - DNA, 49 bp, Emericella nidulans
gaattcactgcggccgccatgcaagatcgacgtagttgccaataatttc

SEQ ID NO: 39525 - DNA, 49 bp, Emericella nidulans
gttctcgagacgagcgatcgccaatcaaggagtttctgcgcagggctta

SEQ ID NO: 39526 - DNA, 41 bp, Emericella nidulans
gaattcactgcggccgccatgtggagcggttctgcgaggtc

SEQ ID NO: 39527 - DNA, 49 bp, Emericella nidulans
gttctcgagacgagcgatcgcatacttcttcagcccacgaagtctttcc

SEQ ID NO: 39528 - DNA, 45 bp, Emericella nidulans
gaattcactgcggccgccatggttgtgcccctcatactaggtccc

SEQ ID NO: 39529 - DNA, 49 bp, Emericella nidulans
gttctcgagacgagcgatcgctttattccttcttgaggttggtgaaacg

SEQ ID NO: 39530 - DNA, 49 bp, Emericella nidulans
gaattcactgcggccgccatgactccttattctagacagccatggaagc

SEQ ID NO: 39531 - DNA, 44 bp, Emericella nidulans; identical to SEQ ID NO: 33663

SEQ ID NO: 39532 - DNA, 45 bp, Emericella nidulans
gaattcactgcggccgccatgagcgtctgtgtatcgtcggtgtcg

SEQ ID NO: 39533 - DNA, 47 bp, Emericella nidulans
gttctcgagacgagcgatcgccaatcgaagcaaccaagctagaatca

SEQ ID NO: 39534 - DNA, 49 bp, Emericella nidulans
gaattcactgcggccgccatgtcttgtctactccatgtcaaggctcttt

SEQ ID NO: 39535 - DNA, 44 bp, Emericella nidulans
gttctcgagacgagcgatcgcctcgtgcgaccactgaggcttct

SEQ ID NO: 39536 - DNA, 41 bp, Emericella nidulans
gaattcactgcggccgccatgacggcgtttcttgcccctcc

SEQ ID NO: 39537 - DNA, 47 bp, Emericella nidulans
gttctcgagacgagcgatcgcgcttgtcctcccttttcgctgccttc

SEQ ID NO: 39538 - DNA, 42 bp, Emericella nidulans
gaattcactgcggccgccatggcagcatgcgaaggccgcata

SEQ ID NO: 39539 - DNA, 41 bp, Emericella nidulans
gttctcgagacgagcgatcgctgcaaattccgccgcccata

SEQ ID NO: 39540 - DNA, 46 bp, Emericella nidulans
gaattcactgcggccgccatgaggtccatgtggtccttgcagtgaa

SEQ ID NO: 39541 - DNA, 43 bp, Emericella nidulans
gttctcgagacgagcgatcgcccacgctcttcagccatgatgc

SEQ ID NO: 39542 - DNA, 41 bp, Emericella nidulans
gaattcactgcggccgccatgtcaagcgcgcaggtgtctgg

SEQ ID NO: 39543 - DNA, 44 bp, Emericella nidulans
gttctcgagacgagcgatcgctgaccatgttcacccacgggaag

SEQ ID NO: 39544 - DNA, 47 bp, Emericella nidulans
gaattcactgcggccgccatgtcattgaaagctgtgaaggcagatgg

SEQ ID NO: 39545 - DNA, 49 bp, Emericella nidulans
gttctcgagacgagcgatcgcataacaacctttgagaaatgccgctgct

SEQ ID NO: 39546 - DNA, 44 bp, Emericella nidulans
gaattcactgcggccgccatgggagcacatagcatcaccaaagc

SEQ ID NO: 39547 - DNA, 41 bp, Emericella nidulans
gttctcgagacgagcgatcgcccctccttgaatggcgacaa

SEQ ID NO: 39548 - DNA, 49 bp, Emericella nidulans
gaattcactgcggccgccatgcatcatactttgctcgactaccatctca

SEQ ID NO: 39549 - DNA, 41 bp, Emericella nidulans
gttctcgagacgagcgatcgcagctggcccggactcgagaa

SEQ ID NO: 39550 - DNA, 48 bp, Emericella nidulans
gaattcactgcggccgccatgcgcaggacattgctaacaagggcgtct

SEQ ID NO: 39551 - DNA, 41 bp, Emericella nidulans
gttctcgagacgagcgatcgcttggcagcctggccaacaat

SEQ ID NO: 39552 - DNA, 41 bp, Emericella nidulans
gaattcactgcggccgccatggcaagccgccaatcgcattc

SEQ ID NO: 39553 - DNA, 41 bp, Emericella nidulans
gttctcgagacgagcgatcgcgcaagcagcgcctcaaaccc

SEQ ID NO: 39554 - DNA, 45 bp, Emericella nidulans
gaattcactgcggccgccatgtgagaacgtacgcacctaatcacg

SEQ ID NO: 39555 - DNA, 43 bp, Emericella nidulans
gttctcgagacgagcgatcgcgcgcagaggtctcggcagtagc

SEQ ID NO: 39556 - DNA, 41 bp, Emericella nidulans
gaattcactgcggccgccatggatgcgccaccgcgtcctat

SEQ ID NO: 39557 - DNA, 49 bp, Emericella nidulans
gttctcgagacgagcgatcgccatgctctattgagcgaaagggtagtcc

SEQ ID NO: 39558 - DNA, 43 bp, Emericella nidulans
gaattcactgcggccgccatgccggcttaccaatcatggcatt

SEQ ID NO: 39559 - DNA, 41 bp, Emericella nidulans
gttctcgagacgagcgatcgccggttgttctgcgctgtggg

SEQ ID NO: 39560 - DNA, 41 bp, Emericella nidulans
gaattcactgcggccgccatgtcatcaagcacgcccgcaag

SEQ ID NO: 39561 - DNA, 49 bp, Emericella nidulans
gttctcgagacgagcgatcgctaccatcctcactcttatccgtcgcctc

SEQ ID NO: 39562 - DNA, 45 bp, Emericella nidulans
gaattcactgcggccgccatgggcccaagaccaggcttaaaagga

SEQ ID NO: 39563 - DNA, 46 bp, Emericella nidulans
gttctcgagacgagcgatcgcgtcttgccacaagagcagctctcca

SEQ ID NO: 39564 - DNA, 43 bp, Emericella nidulans
gaattcactgcggccgccatgcgatgaggagcgactggaggtg

SEQ ID NO: 39565 - DNA, 41 bp, Emericella nidulans
gttctcgagacgagcgatcgcccactccatggccgcgatct

SEQ ID NO: 39566 - DNA, 41 bp, Emericella nidulans
gaattcactgcggccgccatgtcgccaacgccatcaactcc

SEQ ID NO: 39567 - DNA, 41 bp, Emericella nidulans
gttctcgagacgagcgatcgcgccggcctgcctaacggaat

SEQ ID NO: 39568 - DNA, 45 bp, Emericella nidulans
gaattcactgcggccgccatgggtcgtcaggcatacaaccgcaac

SEQ ID NO: 39569 - DNA, 48 bp, Emericella nidulans
gttctcgagacgagcgatcgcgaacgatgacgatatcccaagagtaca

SEQ ID NO: 39570 - DNA, 46 bp, Emericella nidulans
gaattcactgcggccgccatgattgaacaccctgtacgcggggatg

SEQ ID NO: 39571 - DNA, 42 bp, Emericella nidulans
gttctcgagacgagcgatcgcgcgcgcaaaggattccaaaga

SEQ ID NO: 39572 - DNA, 49 bp, Emericella nidulans
gaattcactgcggccgccatgttacatcctgcacatcaagttcttctcc

SEQ ID NO: 39573 - DNA, 43 bp, Emericella nidulans
gttctcgagacgagcgatcgcacgctcgcatcctcctcaaaca

SEQ ID NO: 39574 - DNA, 44 bp, Emericella nidulans
gaattcactgcggccgccatgtgggtgtcctcgagaagctgtcc

SEQ ID NO: 39575 - DNA, 48 bp, Emericella nidulans
gttctcgagacgagcgatcgccagttagcggaggattcagtttgggtc

SEQ ID NO: 39576 - DNA, 41 bp, Emericella nidulans
gaattcactgcggccgccatgggaatccgccgaccctgttc

SEQ ID NO: 39577 - DNA, 42 bp, Emericella nidulans
gttctcgagacgagcgatcgctggagcttccgatcggggata

SEQ ID NO: 39578 - DNA, 41 bp, Emericella nidulans
gaattcactgcggccgccatgcatcccaagccccacgcaga

SEQ ID NO: 39579 - DNA, 43 bp, Emericella nidulans
gttctcgagacgagcgatcgctgaccagtcgcagctctcagaa

SEQ ID NO: 39580 - DNA, 45 bp, Emericella nidulans
gaattcactgcggccgccatggcagtatgccagaccactcgctct

SEQ ID NO: 39581 - DNA, 42 bp, Emericella nidulans
gttctcgagacgagcgatcgcccagtccagcccgttggcttc

SEQ ID NO: 39582 - DNA, 41 bp, Emericella nidulans
gaattcactgcggccgccatgcagatttttgaggggaacca

SEQ ID NO: 39583 - DNA, 44 bp, Emericella nidulans
gttctcgagacgagcgatcgccatgaagacgtaagataatgtgg

SEQ ID NO: 39584 - DNA, 41 bp, Emericella nidulans
gaattcactgcggccgccatgcggcccgtcacgaaaggaaa

SEQ ID NO: 39585 - DNA, 41 bp, Emericella nidulans
gttctcgagacgagcgatcgcgccctcagggcttcggcaag

SEQ ID NO: 39586 - DNA, 41 bp, Emericella nidulans
gaattcactgcggccgccatgaaccatccgcgatgcagcaa

SEQ ID NO: 39587 - DNA, 40 bp, Emericella nidulans
gttctcgagacgagcgatcgcggcgcgctggacgactttg

SEQ ID NO: 39588 - DNA, 41 bp, Emericella nidulans
gaattcactgcggccgccatgccggtgctctgacacgccac

SEQ ID NO: 39589 - DNA, 46 bp, Emericella nidulans
gttctcgagacgagcgatcgctataatcacccgggtgtacggacga

SEQ ID NO: 39590 - DNA, 47 bp, Emericella nidulans
gaattcactgcggccgccatgttcctgctcctgatcctttcgcccac

SEQ ID NO: 39591 - DNA, 47 bp, Emericella nidulans
gttctcgagacgagcgatcgcccgattgagtatatgatgtcgttgga

SEQ ID NO: 39592 - DNA, 41 bp, Emericella nidulans
gaattcactgcggccgccatgccgatgcggatggtacatta

SEQ ID NO: 39593 - DNA, 41 bp, Emericella nidulans
gttctcgagacgagcgatcgcggtttggaatcatcaggagc

SEQ ID NO: 39594 - DNA, 41 bp, Emericella nidulans
gaattcactgcggccgccatgttccattcggcggatgtccc

SEQ ID NO: 39595 - DNA, 49 bp, Emericella nidulans
gttctcgagacgagcgatcgcttatacatatccacagcgaccttgttcc

SEQ ID NO: 39596 - DNA, 48 bp, Emericella nidulans
gaattcactgcggccgccatggtgagcgagcactcatgaaagagctga

SEQ ID NO: 39597 - DNA, 48 bp, Emericella nidulans
gttctcgagacgagcgatcgcgcactgttgatgaagcgcacgaactga

SEQ ID NO: 39598 - DNA, 41 bp, Emericella nidulans
gaattcactgcggccgccatgccgtcttctcggccctcgtg

SEQ ID NO: 39599 - DNA, 49 bp, Emericella nidulans
gttctcgagacgagcgatcgcgttagtcaaccagagacccagacaagtg

SEQ ID NO: 39600 - DNA, 41 bp, Emericella nidulans
gaattcactgcggccgccatgggttaaacccgacatggaga

SEQ ID NO: 39601 - DNA, 40 bp, Emericella nidulans
gttctcgagacgagcgatcgcggcatcaaagctcgagaag

SEQ ID NO: 39602 - DNA, 49 bp, Emericella nidulans
gaattcactgcggccgccatgacctcctcaaactggatcttcaacttca

SEQ ID NO: 39603 - DNA, 49 bp, Emericella nidulans
gttctcgagacgagcgatcgcaacttatttcacatgctccacgttatcc

SEQ ID NO: 39604 - DNA, 49 bp, Emericella nidulans
gaattcactgcggccgccatggtctgagcagaaacatctcgataaatgg

SEQ ID NO: 39605 - DNA, 46 bp, Emericella nidulans
gttctcgagacgagcgatcgctcaacctcttcttcctcattctccc

SEQ ID NO: 39606 - DNA, 41 bp, Emericella nidulans
gaattcactgcggccgccatgcgacgttgccccgatgtgtg

SEQ ID NO: 39607 - DNA, 47 bp, Emericella nidulans
gttctcgagacgagcgatcgctgaaaaatgaagcgacccggtcacca

SEQ ID NO: 39608 - DNA, 45 bp, Emericella nidulans
gaattcactgcggccgccatgtcctccccgatacgaaggaggtag

SEQ ID NO: 39609 - DNA, 49 bp, Emericella nidulans
gttctcgagacgagcgatcgcgtcttaaggacctattccattcccttca

SEQ ID NO: 39610 - DNA, 41 bp, Emericella nidulans
gaattcactgcggccgccatgtctggcgggagaactgctga

SEQ ID NO: 39611 - DNA, 41 bp, Emericella nidulans
gttctcgagacgagcgatcgcagtgacgcggtcgcctccaa

SEQ ID NO: 39612 - DNA, 41 bp, Emericella nidulans
gaattcactgcggccgccatgttcgcccatgccttcggtta

SEQ ID NO: 39613 - DNA, 41 bp, Emericella nidulans
gttctcgagacgagcgatcgcaaggccccggcacagtctcc

SEQ ID NO: 39614 - DNA, 49 bp, Emericella nidulans
gaattcactgcggccgccatgtcggttgattgtactcttcccccgtcct

SEQ ID NO: 39615 - DNA, 49 bp, Emericella nidulans
gttctcgagacgagcgatcgccacgatctgtattcgacttgttaggcac

SEQ ID NO: 39616 - DNA, 49 bp, Emericella nidulans
gaattcactgcggccgccatggggacaagtactatacaacggcgcgaag

SEQ ID NO: 39617 - DNA, 46 bp, Emericella nidulans
gttctcgagacgagcgatcgccggtttcgtgtagattcgtcggagg

SEQ ID NO: 39618 - DNA, 41 bp, Emericella nidulans
gaattcactgcggccgccatgaacttccggcgcgcaatcac

SEQ ID NO: 39619 - DNA, 45 bp, Emericella nidulans
gttctcgagacgagcgatcgcgggatactcccagttcccttctga

SEQ ID NO: 39620 - DNA, 48 bp, Emericella nidulans
gaattcactgcggccgccatgagatgcagttgagaaagttgctcgtga

SEQ ID NO: 39621 - DNA, 41 bp, Emericella nidulans
gttctcgagacgagcgatcgcgaacaggctccggcgtcacc

SEQ ID NO: 39622 - DNA, 41 bp, Emericella nidulans
gaattcactgcggccgccatgcgctaacattcgttcgtcct

SEQ ID NO: 39623 - DNA, 41 bp, Emericella nidulans
gttctcgagacgagcgatcgctgtcccaccttcatttcgac

SEQ ID NO: 39624 - DNA, 41 bp, Emericella nidulans
gaattcactgcggccgccatgcacgcatctccgtgcccaaa

SEQ ID NO: 39625 - DNA, 41 bp, Emericella nidulans
gttctcgagacgagcgatcgcataccggcctcgagcgcacc

SEQ ID NO: 39626 - DNA, 41 bp, Emericella nidulans
gaattcactgcggccgccatgccgttgcgcagacagtcaaa

SEQ ID NO: 39627 - DNA, 47 bp, Emericella nidulans
gttctcgagacgagcgatcgcgtatagcgataatgcgctgacgattg

SEQ ID NO: 39628 - DNA, 41 bp, Emericella nidulans
gaattcactgcggccgccatgcctcatgaagaggcacaaca

SEQ ID NO: 39629 - DNA, 41 bp, Emericella nidulans
gttctcgagacgagcgatcgccgtagaaccccttctcctcc

SEQ ID NO: 39630 - DNA, 41 bp, Emericella nidulans
gaattcactgcggccgccatgagcacgctgcaggatgttat

SEQ ID NO: 39631 - DNA, 41 bp, Emericella nidulans
gttctcgagacgagcgatcgcagatccagatttgtcggtgc

SEQ ID NO: 39632 - DNA, 45 bp, Emericella nidulans
gaattcactgcggccgccatgatcagtcaccagttactacgatct

SEQ ID NO: 39633 - DNA, 40 bp, Emericella nidulans
gttctcgagacgagcgatcgcactcccgtttccgttccta

SEQ ID NO: 39634 - DNA, 41 bp, Emericella nidulans
gaattcactgcggccgccatgcctgagcagaactcgtcgtt

SEQ ID NO: 39635 - DNA, 39 bp, Emericella nidulans
gttctcgagacgagcgatcgcctcccatgctggtccaag

SEQ ID NO: 39636 - DNA, 41 bp, Emericella nidulans
gaattcactgcggccgccatggcagggacaccacccgcagt

SEQ ID NO: 39637 - DNA, 49 bp, Emericella nidulans
gttctcgagacgagcgatcgcaggggaaaataaataccatgtccaaaga

SEQ ID NO: 39638 - DNA, 41 bp, Emericella nidulans
gaattcactgcggccgccatggccgctagccgcgacctttc

SEQ ID NO: 39639 - DNA, 42 bp, Emericella nidulans
gttctcgagacgagcgatcgctgtcttgccctggcgttggtc

SEQ ID NO: 39640 - DNA, 47 bp, Emericella nidulans
gaattcactgcggccgccatggcttactgtcggtagctgttcgctta

SEQ ID NO: 39641 - DNA, 45 bp, Emericella nidulans
gttctcgagacgagcgatcgctcacgaacgaaaacgcacaacaga

SEQ ID NO: 39642 - DNA, 41 bp, Emericella nidulans
gaattcactgcggccgccatgcgcccacgattttggcaagc

SEQ ID NO: 39643 - DNA, 46 bp, Emericella nidulans
gttctcgagacgagcgatcgcaaggtaataggggaaggggaatcct

SEQ ID NO: 39644 - DNA, 49 bp, Emericella nidulans
gaattcactgcggccgccatgattgattttggagggtgcttatgctctg

SEQ ID NO: 39645 - DNA, 41 bp, Emericella nidulans
gttctcgagacgagcgatcgcgtcgtggaaacgccggttgg

SEQ ID NO: 39646 - DNA, 43 bp, Emericella nidulans
gaattcactgcggccgccatggctggagctgctgaagtcgatg

SEQ ID NO: 39647 - DNA, 48 bp, Emericella nidulans
gttctcgagacgagcgatcgccttcatcttccctccatcaacaaccgt

SEQ ID NO: 39648 - DNA, 49 bp, Emericella nidulans
gaattcactgcggccgccatgacactaacactccgcaggaaattttcaa

SEQ ID NO: 39649 - DNA, 41 bp, Emericella nidulans
gttctcgagacgagcgatcgcgccggtggcaggttcgtcat

SEQ ID NO: 39650 - DNA, 46 bp, Emericella nidulans
gaattcactgcggccgccatggacgatgatgaggaagatgacgaag

SEQ ID NO: 39651 - DNA, 47 bp, Emericella nidulans
gttctcgagacgagcgatcgcggcgtataccttccttgacgtccttg

SEQ ID NO: 39652 - DNA, 47 bp, Emericella nidulans
gaattcactgcggccgccatgagttccctctactattatcttcaagg

SEQ ID NO: 39653 - DNA, 43 bp, Emericella nidulans
gttctcgagacgagcgatcgcccctaactgccctttctacttt

SEQ ID NO: 39654 - DNA, 43 bp, Emericella nidulans
gaattcactgcggccgccatggcgcatctggacttgctcaatg

SEQ ID NO: 39655 - DNA, 44 bp, Emericella nidulans
gttctcgagacgagcgatcgcgccaaaatcggactgttgcttgc

SEQ ID NO: 39656 - DNA, 49 bp, Emericella nidulans
gaattcactgcggccgccatgagaccaccctctaccaattgatgtactg

SEQ ID NO: 39657 - DNA, 49 bp, Emericella nidulans
gttctcgagacgagcgatcgcaatcggataccggagaggtatttgagga

SEQ ID NO: 39658 - DNA, 41 bp, Emericella nidulans
gaattcactgcggccgccatggctgagcgacatggatacac

SEQ ID NO: 39659 - DNA, 41 bp, Emericella nidulans
gttctcgagacgagcgatcgcgtaccacggagcagaccagt

SEQ ID NO: 39660 - DNA, 48 bp, Emericella nidulans
gaattcactgcggccgccatggtacaaaaattccgccccgtagtagtg

SEQ ID NO: 39661 - DNA, 46 bp, Emericella nidulans
gttctcgagacgagcgatcgccgccgtctatgcctcggatccaaaa

SEQ ID NO: 39662 - DNA, 41 bp, Emericella nidulans
gaattcactgcggccgccatgggtattatgaagcgggaggc

SEQ ID NO: 39663 - DNA, 41 bp, Emericella nidulans
gttctcgagacgagcgatcgcgcgctgagatgtaggacgtt

SEQ ID NO: 39664 - DNA, 41 bp, Emericella nidulans
gaattcactgcggccgccatgtggcacgatagcgacgacga

SEQ ID NO: 39665 - DNA, 48 bp, Emericella nidulans
gttctcgagacgagcgatcgccagggggagagcttgaagcgttccata

SEQ ID NO: 39666 - DNA, 41 bp, Emericella nidulans
gaattcactgcggccgccatgggtcatcgttgacggattca

SEQ ID NO: 39667 - DNA, 41 bp, Emericella nidulans
gttctcgagacgagcgatcgccttcgtacgtggtgcagatg

SEQ ID NO: 39668 - DNA, 49 bp, Emericella nidulans
gaattcactgcggccgccatgacagcgactagtctctgactccgccaaa

SEQ ID NO: 39669 - DNA, 41 bp, Emericella nidulans
gttctcgagacgagcgatcgcggctgcagcacgtcaggagg

SEQ ID NO: 39670 - DNA, 48 bp, Emericella nidulans
gaattcactgcggccgccatgcagtaaactgatctgatcccagcaatc

SEQ ID NO: 39671 - DNA, 47 bp, Emericella nidulans
gttctcgagacgagcgatcgcgggttgctagaattcctttcctcgtc

SEQ ID NO: 39672 - DNA, 44 bp, Emericella nidulans
gaattcactgcggccgccatgcgctcatcgacaaaattgcgttt

SEQ ID NO: 39673 - DNA, 48 bp, Emericella nidulans
gttctcgagacgagcgatcgcgttctaaagcttgttgcccatgttcac

SEQ ID NO: 39674 - DNA, 41 bp, Emericella nidulans
gaattcactgcggccgccatgccaccctccccaagttttat

SEQ ID NO: 39675 - DNA, 44 bp, Emericella nidulans
gttctcgagacgagcgatcgcagttgatgatgacaaaggctagg

SEQ ID NO: 39676 - DNA, 42 bp, Emericella nidulans
gaattcactgcggccgccatgcgactcgagcgacagcgatga

SEQ ID NO: 39677 - DNA, 43 bp, Emericella nidulans
gttctcgagacgagcgatcgcgttgccaacaaagagggtgtcg

SEQ ID NO: 39678 - DNA, 44 bp, Emericella nidulans
gaattcactgcggccgccatggagcttgtggatcttaacgtctt

SEQ ID NO: 39679 - DNA, 46 bp, Emericella nidulans
gttctcgagacgagcgatcgccattatgtacaccttcttcaattcg

SEQ ID NO: 39680 - DNA, 39 bp, Emericella nidulans
gaattcactgcggccgccatgaacgttagcgcatggaac

SEQ ID NO: 39681 - DNA, 41 bp, Emericella nidulans
gttctcgagacgagcgatcgcgatcgagttaagcgcggaaa

SEQ ID NO: 39682 - DNA, 41 bp, Emericella nidulans
gaattcactgcggccgccatgtggtgaacgcggtcggtttg

SEQ ID NO: 39683 - DNA, 41 bp, Emericella nidulans
gttctcgagacgagcgatcgctccaagcccagcccaagtcc

SEQ ID NO: 39684 - DNA, 41 bp, Emericella nidulans
gaattcactgcggccgccatggcgggatgtccaatcccaca

SEQ ID NO: 39685 - DNA, 49 bp, Emericella nidulans
gttctcgagacgagcgatcgccctccttacaaagttcgcctagagtggc

SEQ ID NO: 39686 - DNA, 48 bp, Emericella nidulans
gaattcactgcggccgccatggccatgtcgttgcttcccgacgtctta

SEQ ID NO: 39687 - DNA, 41 bp, Emericella nidulans
gttctcgagacgagcgatcgcagcctgcaaccggatcgaga

SEQ ID NO: 39688 - DNA, 41 bp, Emericella nidulans
gaattcactgcggccgccatgaggacgaggcggccggtatc

SEQ ID NO: 39689 - DNA, 42 bp, Emericella nidulans
gttctcgagacgagcgatcgctgccccctccctggtcttatg

SEQ ID NO: 39690 - DNA, 41 bp, Emericella nidulans
gaattcactgcggccgccatggagtgagacgggtaggatgc

SEQ ID NO: 39691 - DNA, 41 bp, Emericella nidulans
gttctcgagacgagcgatcgccacctgctttgcacacatct

SEQ ID NO: 39692 - DNA, 39 bp, Emericella nidulans
gaattcactgcggccgccatgtgcactccggtacaaatg

SEQ ID NO: 39693 - DNA, 41 bp, Emericella nidulans
gttctcgagacgagcgatcgcgccgagcattcttctctctc

SEQ ID NO: 39694 - DNA, 42 bp, Emericella nidulans
gaattcactgcggccgccatgctcacgctgcattgtgctgct

SEQ ID NO: 39695 - DNA, 49 bp, Emericella nidulans
gttctcgagacgagcgatcgcaagcgcataacgaaaatcctttgattcc

SEQ ID NO: 39696 - DNA, 40 bp, Emericella nidulans
gaattcactgcggccgccatgcgctgtggaccgctatatg

SEQ ID NO: 39697 - DNA, 46 bp, Emericella nidulans
gttctcgagacgagcgatcgctgtcagaacacaagatatcaacacc

SEQ ID NO: 39698 - DNA, 46 bp, Emericella nidulans
gaattcactgcggccgccatgagaagttcgattacatcgtttatcc

SEQ ID NO: 39699 - DNA, 41 bp, Emericella nidulans
gttctcgagacgagcgatcgcctgtggctgatgctgacact

SEQ ID NO: 39700 - DNA, 42 bp, Emericella nidulans
gaattcactgcggccgccatggattccgatcgcggtcatccc

SEQ ID NO: 39701 - DNA, 45 bp, Emericella nidulans
gttctcgagacgagcgatcgctgtgaagggcctgaacagtttcca

SEQ ID NO: 39702 - DNA, 49 bp, Emericella nidulans
gaattcactgcggccgccatgtgtcagtactgacaaagtgagtctcgtg

SEQ ID NO: 39703 - DNA, 49 bp, Emericella nidulans
gttctcgagacgagcgatcgcccttcgtaaagtagtctattgcggtcag

SEQ ID NO: 39704 - DNA, 41 bp, Emericella nidulans
gaattcactgcggccgccatgtcactcagcatctggcaaac

SEQ ID NO: 39705 - DNA, 41 bp, Emericella nidulans
gttctcgagacgagcgatcgcagaatgcagcctcagggtaa

SEQ ID NO: 39706 - DNA, 41 bp, Emericella nidulans
gaattcactgcggccgccatgccctcctccgttccccatcg

SEQ ID NO: 39707 - DNA, 47 bp, Emericella nidulans
gttctcgagacgagcgatcgcacaccctctttaatccgcgttcctca

SEQ ID NO: 39708 - DNA, 46 bp, Emericella nidulans
gaattcactgcggccgccatggggctaagctcacaatatctttgta

SEQ ID NO: 39709 - DNA, 42 bp, Emericella nidulans
gttctcgagacgagcgatcgcgcaagcttgaatcgtctatcg

SEQ ID NO: 39710 - DNA, 41 bp, Emericella nidulans
gaattcactgcggccgccatgcaccattcagcgaggtgtta

SEQ ID NO: 39711 - DNA, 41 bp, Emericella nidulans
gttctcgagacgagcgatcgctaaccaactccgcagcctta

SEQ ID NO: 39712 - DNA, 49 bp, Emericella nidulans
gaattcactgcggccgccatgagaacagaaagagtcgacaacagtctcc

SEQ ID NO: 39713 - DNA, 49 bp, Emericella nidulans
gttctcgagacgagcgatcgcctccggcgtagattctccagttacaggt

SEQ ID NO: 39714 - DNA, 42 bp, Emericella nidulans
gaattcactgcggccgccatggtggaacagcggccaacctga

SEQ ID NO: 39715 - DNA, 49 bp, Emericella nidulans
gttctcgagacgagcgatcgcttgattctaattacaggcgatccactcg

SEQ ID NO: 39716 - DNA, 43 bp, Emericella nidulans
gaattcactgcggccgccatgtgctcaccataatattctctgc

SEQ ID NO: 39717 - DNA, 44 bp, Emericella nidulans
gttctcgagacgagcgatcgcctctcagcccttctcatagactg

SEQ ID NO: 39718 - DNA, 45 bp, Emericella nidulans
gaattcactgcggccgccatggactccaagtcggaggaggattgg

SEQ ID NO: 39719 - DNA, 44 bp, Emericella nidulans
gttctcgagacgagcgatcgccaggaatgctgttcggctcatcc

SEQ ID NO: 39720 - DNA, 42 bp, Emericella nidulans
gaattcactgcggccgccatgtctcaggggcttgcgatgacg

SEQ ID NO: 39721 - DNA, 45 bp, Emericella nidulans
gttctcgagacgagcgatcgcgcgatgttgatccctagggtcgtg

SEQ ID NO: 39722 - DNA, 49 bp, Emericella nidulans
gaattcactgcggccgccatgtccaaaactatctaggtccgctcattgc

SEQ ID NO: 39723 - DNA, 47 bp, Emericella nidulans
gttctcgagacgagcgatcgcagttcagtctttgcattactgcgtga

SEQ ID NO: 39724 - DNA, 40 bp, Emericella nidulans
gaattcactgcggccgccatgacggcgttgaagcagtatg

SEQ ID NO: 39725 - DNA, 41 bp, Emericella nidulans
gttctcgagacgagcgatcgcataaacagccacggaacctg

SEQ ID NO: 39726 - DNA, 43 bp, Emericella nidulans
gaattcactgcggccgccatgaaatattcggaatccaatcctg

SEQ ID NO: 39727 - DNA, 41 bp, Emericella nidulans
gttctcgagacgagcgatcgccggaggtaaaatggcttgaa

SEQ ID NO: 39728 - DNA, 41 bp, Emericella nidulans
gaattcactgcggccgccatgacgggctggatatcaaggat

SEQ ID NO: 39729 - DNA, 41 bp, Emericella nidulans
gttctcgagacgagcgatcgccgcatggtacttctcccatt

SEQ ID NO: 39730 - DNA, 41 bp, Emericella nidulans
gaattcactgcggccgccatgtacgtgctcgactcgggtat

SEQ ID NO: 39731 - DNA, 41 bp, Emericella nidulans
gttctcgagacgagcgatcgccttcatgtccggcttggtat

SEQ ID NO: 39732 - DNA, 49 bp, Emericella nidulans
gaattcactgcggccgccatgaatggaacgtacaatcaattgacaggtg

SEQ ID NO: 39733 - DNA, 41 bp, Emericella nidulans
gttctcgagacgagcgatcgccgggtcgaagtgcgcgatgt

SEQ ID NO: 39734 - DNA, 49 bp, Emericella nidulans
gaattcactgcggccgccatgaggcagcagaggagaatatcatcgtcaa

SEQ ID NO: 39735 - DNA, 49 bp, Emericella nidulans
gttctcgagacgagcgatcgcaccatcacagaaagagataacggcccac

SEQ ID NO: 39736 - DNA, 41 bp, Emericella nidulans
gaattcactgcggccgccatgcgcgaaaaggcaaccagcaa

SEQ ID NO: 39737 - DNA, 42 bp, Emericella nidulans
gttctcgagacgagcgatcgctgccggtcgcttcctggtact

SEQ ID NO: 39738 - DNA, 41 bp, Emericella nidulans
gaattcactgcggccgccatgcgacgctcgcctttgccagt

SEQ ID NO: 39739 - DNA, 46 bp, Emericella nidulans
gttctcgagacgagcgatcgcataataagcctcgatcgcatccaca

SEQ ID NO: 39740 - DNA, 41 bp, Emericella nidulans
gaattcactgcggccgccatgaacgtctccggatcaacaag

SEQ ID NO: 39741 - DNA, 43 bp, Emericella nidulans
gttctcgagacgagcgatcgcctcaacaaactccttccaagtt

SEQ ID NO: 39742 - DNA, 46 bp, Emericella nidulans
gaattcactgcggccgccatgaaaaccatcaataacggaatatgaa

SEQ ID NO: 39743 - DNA, 41 bp, Emericella nidulans
gttctcgagacgagcgatcgccatcatgagaccggtgaaaa

SEQ ID NO: 39744 - DNA, 41 bp, Emericella nidulans
gaattcactgcggccgccatgacagactctggagggccatt

SEQ ID NO: 39745 - DNA, 41 bp, Emericella nidulans
gttctcgagacgagcgatcgcccattatacccggaatccta

SEQ ID NO: 39746 - DNA, 41 bp, Emericella nidulans
gaattcactgcggccgccatgtgggtccgcggagacatggt

SEQ ID NO: 39747 - DNA, 43 bp, Emericella nidulans
gttctcgagacgagcgatcgctgagatgaagggcagcccaagc

SEQ ID NO: 39748 - DNA, 41 bp, Emericella nidulans
gaattcactgcggccgccatgctttcgcgcaaactaggaag

SEQ ID NO: 39749 - DNA, 41 bp, Emericella nidulans
gttctcgagacgagcgatcgcgatatccaccacgagggaac

SEQ ID NO: 39750 - DNA, 43 bp, Emericella nidulans
gaattcactgcggccgccatggggaatttagtggctcttatgg

SEQ ID NO: 39751 - DNA, 45 bp, Emericella nidulans
gttctcgagacgagcgatcgcctctagtaccttctcggagtcctt

SEQ ID NO: 39752 - DNA, 49 bp, Emericella nidulans
gaattcactgcggccgccatgctataggaatcgaacactctcgggcaga

SEQ ID NO: 39753 - DNA, 49 bp, Emericella nidulans
gttctcgagacgagcgatcgcctgctccatggtctcaatcttatggcta

SEQ ID NO: 39754 - DNA, 48 bp, Emericella nidulans
gaattcactgcggccgccatggaactggtccaggagccagtgctcgta

SEQ ID NO: 39755 - DNA, 42 bp, Emericella nidulans
gttctcgagacgagcgatcgcgcaagcttgccgaagctgacg

SEQ ID NO: 39756 - DNA, 49 bp, Emericella nidulans
gaattcactgcggccgccatggatgtctacaagctttcatcgttggtca

SEQ ID NO: 39757 - DNA, 41 bp, Emericella nidulans
gttctcgagacgagcgatcgcttgggcctgggcctgagctt

SEQ ID NO: 39758 - DNA, 48 bp, Emericella nidulans
gaattcactgcggccgccatgcaagatgcctaccgagttcatcagcct

SEQ ID NO: 39759 - DNA, 44 bp, Emericella nidulans
gttctcgagacgagcgatcgccagcatagatgcggtcgatttgc

SEQ ID NO: 39760 - DNA, 41 bp, Emericella nidulans
gaattcactgcggccgccatggggggctaccctccccagga

SEQ ID NO: 39761 - DNA, 41 bp, Emericella nidulans
gttctcgagacgagcgatcgccgcgtcatgaagggcagcat

SEQ ID NO: 39762 - DNA, 39 bp, Emericella nidulans
gaattcactgcggccgccatgactggcgcccgaactttt

SEQ ID NO: 39763 - DNA, 41 bp, Emericella nidulans
gttctcgagacgagcgatcgccaggcacgtgctcatcaata

SEQ ID NO: 39764 - DNA, 41 bp, Emericella nidulans
gaattcactgcggccgccatggcgtggagcccaaagtccag

SEQ ID NO: 39765 - DNA, 49 bp, Emericella nidulans
gttctcgagacgagcgatcgcagcaatagttaatgtttgcttcggggag

SEQ ID NO: 39766 - DNA, 41 bp, Emericella nidulans
gaattcactgcggccgccatgcgagacgttctgcgcggtca

SEQ ID NO: 39767 - DNA, 46 bp, Emericella nidulans
gttctcgagacgagcgatcgcgcgcgactttattacatccgcgact

SEQ ID NO: 39768 - DNA, 46 bp, Emericella nidulans
gaattcactgcggccgccatgcccaaagcccacaattgtacaagca

SEQ ID NO: 39769 - DNA, 45 bp, Emericella nidulans
gttctcgagacgagcgatcgcaaccggatatttggcaatccaaga

SEQ ID NO: 39770 - DNA, 49 bp, Emericella nidulans
gaattcactgcggccgccatgtcatatataagccctgggatatgagtcg

SEQ ID NO: 39771 - DNA, 41 bp, Emericella nidulans
gttctcgagacgagcgatcgcgcgcgggacaaaaggactga

SEQ ID NO: 39772 - DNA, 49 bp, Emericella nidulans
gaattcactgcggccgccatgcactaacttattttggcaaagagccaga

SEQ ID NO: 39773 - DNA, 49 bp, Emericella nidulans
gttctcgagacgagcgatcgccaattgtgaaaacagggatcctgctggt

SEQ ID NO: 39774 - DNA, 41 bp, Emericella nidulans
gaattcactgcggccgccatggcggactttggttgagacat

SEQ ID NO: 39775 - DNA, 41 bp, Emericella nidulans
gttctcgagacgagcgatcgccatcttcttcacctcttcca

SEQ ID NO: 39776 - DNA, 49 bp, Emericella nidulans
gaattcactgcggccgccatgatagagttgtctacccctaccaccttcg

SEQ ID NO: 39777 - DNA, 49 bp, Emericella nidulans
gttctcgagacgagcgatcgcggttgtctcctggtagaaaagcacatac

SEQ ID NO: 39778 - DNA, 49 bp, Emericella nidulans
gaattcactgcggccgccatgtctcgtcaaacattattactgcgacatc

SEQ ID NO: 39779 - DNA, 44 bp, Emericella nidulans
gttctcgagacgagcgatcgcgaacttgatccggggcttcttgg

SEQ ID NO: 39780 - DNA, 42 bp, Emericella nidulans
gaattcactgcggccgccatggcttctctcccgtgcccttgc

SEQ ID NO: 39781 - DNA, 49 bp, Emericella nidulans
gttctcgagacgagcgatcgccccaacataccagacttcgacgccaaga

SEQ ID NO: 39782 - DNA, 49 bp, Emericella nidulans
gaattcactgcggccgccatggatggattcaatattaggtttccggcta

SEQ ID NO: 39783 - DNA, 41 bp, Emericella nidulans
gttctcgagacgagcgatcgctgcaaccggcatgtggcgta

SEQ ID NO: 39784 - DNA, 49 bp, Emericella nidulans
gaattcactgcggccgccatgagttttggttcagatgctcaagaaaatg

SEQ ID NO: 39785 - DNA, 49 bp, Emericella nidulans
gttctcgagacgagcgatcgcattccaggtgacaagttcatggccgttt

SEQ ID NO: 39786 - DNA, 41 bp, Emericella nidulans
gaattcactgcggccgccatggcaacacaagcaagaaccaa

SEQ ID NO: 39787 - DNA, 41 bp, Emericella nidulans
gttctcgagacgagcgatcgctcaggctcaaattccgactc

SEQ ID NO: 39788 - DNA, 44 bp, Emericella nidulans
gaattcactgcggccgccatgtcgatttgccatacacagtaaaa

SEQ ID NO: 39789 - DNA, 41 bp, Emericella nidulans
gttctcgagacgagcgatcgccgtgcacgtagattccttga

SEQ ID NO: 39790 - DNA, 42 bp, Emericella nidulans
gaattcactgcggccgccatgttccccgaaaagggaagatga

SEQ ID NO: 39791 - DNA, 41 bp, Emericella nidulans
gttctcgagacgagcgatcgctccacctgggagttgcacca

SEQ ID NO: 39792 - DNA, 42 bp, Emericella nidulans
gaattcactgcggccgccatggtcttctcgccgaatcgcaca

SEQ ID NO: 39793 - DNA, 47 bp, Emericella nidulans
gttctcgagacgagcgatcgcttctcaaatccgccactatgaagaaa

SEQ ID NO: 39794 - DNA, 43 bp, Emericella nidulans
gaattcactgcggccgccatgcaatagcgacagctacaacagc

SEQ ID NO: 39795 - DNA, 41 bp, Emericella nidulans
gttctcgagacgagcgatcgcagttttctcggcctcaaggt

SEQ ID NO: 39796 - DNA, 43 bp, Emericella nidulans
gaattcactgcggccgccatgcggcccattgtgtctcatggaa

SEQ ID NO: 39797 - DNA, 49 bp, Emericella nidulans
gttctcgagacgagcgatcgcaccaatgtcataagtctgccagttgagc

SEQ ID NO: 39798 - DNA, 41 bp, Emericella nidulans
gaattcactgcggccgccatgtattcgagatcgacccaaca

SEQ ID NO: 39799 - DNA, 41 bp, Emericella nidulans
gttctcgagacgagcgatcgctcgaccagattgagcatctt

SEQ ID NO: 39800 - DNA, 41 bp, Emericella nidulans
gaattcactgcggccgccatgcgcggcctcactccaaaacc

SEQ ID NO: 39801 - DNA, 42 bp, Emericella nidulans
gttctcgagacgagcgatcgcaacgcacgttggacggtgaca

SEQ ID NO: 39802 - DNA, 41 bp, Emericella nidulans
gaattcactgcggccgccatgtgacaacatgccaaggaaga

SEQ ID NO: 39803 - DNA, 40 bp, Emericella nidulans
gttctcgagacgagcgatcgcgcgctcactgatctggttc

SEQ ID NO: 39804 - DNA, 45 bp, Emericella nidulans
gaattcactgcggccgccatgtgcgcgaatctctaaggaccaaca

SEQ ID NO: 39805 - DNA, 46 bp, Emericella nidulans
gttctcgagacgagcgatcgcttcccgtgaataaacgccgtctaca

SEQ ID NO: 39806 - DNA, 41 bp, Emericella nidulans
gaattcactgcggccgccatgatcggccggatcatcgacca

SEQ ID NO: 39807 - DNA, 39 bp, Emericella nidulans
gttctcgagacgagcgatcgcgcgcgggcgccagaatgt

SEQ ID NO: 39808 - DNA, 49 bp, Emericella nidulans
gaattcactgcggccgccatgtatgtacttctctacgactcgcacaacg

SEQ ID NO: 39809 - DNA, 45 bp, Emericella nidulans
gttctcgagacgagcgatcgcggatgtctccatcactggcagcct

SEQ ID NO: 39810 - DNA, 41 bp, Emericella nidulans
gaattcactgcggccgccatgcattctcaggaggaggagga

SEQ ID NO: 39811 - DNA, 41 bp, Emericella nidulans
gttctcgagacgagcgatcgcgtttccgccaaaaatattgc

SEQ ID NO: 39812 - DNA, 41 bp, Emericella nidulans
gaattcactgcggccgccatggcatggcgtaacttgacaaa

SEQ ID NO: 39813 - DNA, 41 bp, Emericella nidulans
gttctcgagacgagcgatcgcacccatccttccacctttct

SEQ ID NO: 39814 - DNA, 41 bp, Emericella nidulans
gaattcactgcggccgccatggtcgttgtctgggggagtat

SEQ ID NO: 39815 - DNA, 40 bp, Emericella nidulans
gttctcgagacgagcgatcgcgagcaaagacagcgtctcg

SEQ ID NO: 39816 - DNA, 41 bp, Emericella nidulans
gaattcactgcggccgccatgtcactgtggaagagcggaat

SEQ ID NO: 39817 - DNA, 41 bp, Emericella nidulans
gttctcgagacgagcgatcgccctcagaggaggtccagaga

SEQ ID NO: 39818 - DNA, 41 bp, Emericella nidulans
gaattcactgcggccgccatgcctaccacagtggatggagg

SEQ ID NO: 39819 - DNA, 42 bp, Emericella nidulans
gttctcgagacgagcgatcgccacgtgcagtaccaaatagcc

SEQ ID NO: 39820 - DNA, 49 bp, Emericella nidulans
gaattcactgcggccgccatgtctcagatcttattcagatttccccaga

SEQ ID NO: 39821 - DNA, 46 bp, Emericella nidulans
gttctcgagacgagcgatcgcctaccaccatgatattggccccaga

SEQ ID NO: 39822 - DNA, 41 bp, Emericella nidulans
gaattcactgcggccgccatgcagtcgtctcagcagaatgg

SEQ ID NO: 39823 - DNA, 41 bp, Emericella nidulans
gttctcgagacgagcgatcgctttggccgagactttatggt

SEQ ID NO: 39824 - DNA, 49 bp, Emericella nidulans
gaattcactgcggccgccatgcatctttgacgaggttttcacgggcctc

SEQ ID NO: 39825 - DNA, 46 bp, Emericella nidulans
gttctcgagacgagcgatcgcgtcgttcttgaagtcgttccaggat

SEQ ID NO: 39826 - DNA, 41 bp, Emericella nidulans
gaattcactgcggccgccatgcaagttgagaccttggaggc

SEQ ID NO: 39827 - DNA, 42 bp, Emericella nidulans
gttctcgagacgagcgatcgccagagagctctccgtttgttg

SEQ ID NO: 39828 - DNA, 46 bp, Emericella nidulans
gaattcactgcggccgccatgggcatttattgaagatggcgcgaga

SEQ ID NO: 39829 - DNA, 46 bp, Emericella nidulans
gttctcgagacgagcgatcgctttcgtcctttgcaatctccatgtc

SEQ ID NO: 39830 - DNA, 44 bp, Emericella nidulans
gaattcactgcggccgccatgggtcgtcagttcctttgccatcg

SEQ ID NO: 39831 - DNA, 49 bp, Emericella nidulans
gttctcgagacgagcgatcgcggaacgataagtcctagccaggtcgaaa

SEQ ID NO: 39832 - DNA, 49 bp, Emericella nidulans
gaattcactgcggccgccatgtcagattatgttactgttccagccaagc

SEQ ID NO: 39833 - DNA, 44 bp, Emericella nidulans
gttctcgagacgagcgatcgctcatgcggcaatgtcaatcagga

SEQ ID NO: 39834 - DNA, 44 bp, Emericella nidulans
gaattcactgcggccgccatgggactgcgcaggtcttcttcaca

SEQ ID NO: 39835 - DNA, 47 bp, Emericella nidulans
gttctcgagacgagcgatcgcgcaggatgaactcttcgctcacaagc

SEQ ID NO: 39836 - DNA, 49 bp, Emericella nidulans
gaattcactgcggccgccatggatcttctcgatagacgagcacccgatg

SEQ ID NO: 39837 - DNA, 47 bp, Emericella nidulans
gttctcgagacgagcgatcgccccatccaaaatagccaatgtcatgc

SEQ ID NO: 39838 - DNA, 47 bp, Emericella nidulans
gaattcactgcggccgccatgctaatcggacagactgtcgacacaaa

SEQ ID NO: 39839 - DNA, 45 bp, Emericella nidulans
gttctcgagacgagcgatcgccttctcctcagtgtccgaatccaa

SEQ ID NO: 39840 - DNA, 41 bp, Emericella nidulans
gaattcactgcggccgccatgcgaggatcctcactccttca

SEQ ID NO: 39841 - DNA, 41 bp, Emericella nidulans
gttctcgagacgagcgatcgcggcgtcaatttagccttgag

SEQ ID NO: 39842 - DNA, 41 bp, Emericella nidulans
gaattcactgcggccgccatgtgggactgacccccgggata

SEQ ID NO: 39843 - DNA, 41 bp, Emericella nidulans
gttctcgagacgagcgatcgccggcgctgcacgacttcctt

SEQ ID NO: 39844 - DNA, 41 bp, Emericella nidulans
gaattcactgcggccgccatggaaggagcattcaaagtggg

SEQ ID NO: 39845 - DNA, 41 bp, Emericella nidulans
gttctcgagacgagcgatcgcatcttcaccggaaagggatt

SEQ ID NO: 39846 - DNA, 49 bp, Emericella nidulans
gaattcactgcggccgccatgaaatgcatttacacttagccgtttgtcc

SEQ ID NO: 39847 - DNA, 46 bp, Emericella nidulans
gttctcgagacgagcgatcgcgatgtttgaaggttgtacgcctgag

SEQ ID NO: 39848 - DNA, 41 bp, Emericella nidulans
gaattcactgcggccgccatgtacgccaggtcaaagttcct

SEQ ID NO: 39849 - DNA, 49 bp, Emericella nidulans
gttctcgagacgagcgatcgctatattacttaccgttgtacatgaccgt

SEQ ID NO: 39850 - DNA, 41 bp, Emericella nidulans
gaattcactgcggccgccatgcatcctcgcctccgcctcag

SEQ ID NO: 39851 - DNA, 47 bp, Emericella nidulans
gttctcgagacgagcgatcgctggttttggttagtgctgtgcccttc

SEQ ID NO: 39852 - DNA, 45 bp, Emericella nidulans
gaattcactgcggccgccatgtgccacacaataaccgctttcagc

SEQ ID NO: 39853 - DNA, 48 bp, Emericella nidulans
gttctcgagacgagcgatcgcgcctactggacataacatccaggtccc

SEQ ID NO: 39854 - DNA, 45 bp, Emericella nidulans
gaattcactgcggccgccatgcctcagtctgcttgtcaataaatg

SEQ ID NO: 39855 - DNA, 40 bp, Emericella nidulans
gttctcgagacgagcgatcgcaggctccattatggcgatg

SEQ ID NO: 39856 - DNA, 41 bp, Emericella nidulans
gaattcactgcggccgccatggcatcacagacctcgttgac

SEQ ID NO: 39857 - DNA, 42 bp, Emericella nidulans
gttctcgagacgagcgatcgcccctgtggtcgtatgtacttg

SEQ ID NO: 39858 - DNA, 42 bp, Emericella nidulans
gaattcactgcggccgccatggcccgccacggcttacagcta

SEQ ID NO: 39859 - DNA, 49 bp, Emericella nidulans
gttctcgagacgagcgatcgcctgcgttttcttagtctttgccttctcc

SEQ ID NO: 39860 - DNA, 41 bp, Emericella nidulans
gaattcactgcggccgccatgccatctgatggagatggtca

SEQ ID NO: 39861 - DNA, 42 bp, Emericella nidulans
gttctcgagacgagcgatcgcggcttcatggaacacagactc

SEQ ID NO: 39862 - DNA, 44 bp, Emericella nidulans
gaattcactgcggccgccatgcggcagtccccagctacaatgag

SEQ ID NO: 39863 - DNA, 44 bp, Emericella nidulans
gttctcgagacgagcgatcgcgaaatgtaggtgggcatgtggaa

SEQ ID NO: 39864 - DNA, 41 bp, Emericella nidulans
gaattcactgcggccgccatgcaccacaagaaccaccacag

SEQ ID NO: 39865 - DNA, 41 bp, Emericella nidulans
gttctcgagacgagcgatcgcggaagggttcgacgtcatag

SEQ ID NO: 39866 - DNA, 42 bp, Emericella nidulans
gaattcactgcggccgccatgggtcaagaatcctggacgtaa

SEQ ID NO: 39867 - DNA, 41 bp, Emericella nidulans
gttctcgagacgagcgatcgctttctcgttgttcacctccc

SEQ ID NO: 39868 - DNA, 41 bp, Emericella nidulans
gaattcactgcggccgccatgcacagcggacttgccctcca

SEQ ID NO: 39869 - DNA, 41 bp, Emericella nidulans
gttctcgagacgagcgatcgcaacacccgccatcgcctcac

SEQ ID NO: 39870 - DNA, 40 bp, Emericella nidulans
gaattcactgcggccgccatggcgtttcctgagcgatgac

SEQ ID NO: 39871 - DNA, 41 bp, Emericella nidulans
gttctcgagacgagcgatcgcggcaatgggatattgttggt

SEQ ID NO: 39872 - DNA, 41 bp, Emericella nidulans
gaattcactgcggccgccatgccatcccggtgatatcctct

SEQ ID NO: 39873 - DNA, 44 bp, Emericella nidulans
gttctcgagacgagcgatcgcgaaattgctcatagtatgccatc

SEQ ID NO: 39874 - DNA, 41 bp, Emericella nidulans
gaattcactgcggccgccatgccaggcagcggtgccagtct

SEQ ID NO: 39875 - DNA, 49 bp, Emericella nidulans
gttctcgagacgagcgatcgccaaaataccaaccaaacactcccccaga

SEQ ID NO: 39876 - DNA, 44 bp, Emericella nidulans
gaattcactgcggccgccatgcaaacgaggtctattggcccctc

SEQ ID NO: 39877 - DNA, 43 bp, Emericella nidulans
gttctcgagacgagcgatcgccgaggaaatgagggctgatcca

SEQ ID NO: 39878 - DNA, 49 bp, Emericella nidulans
gaattcactgcggccgccatgtatagagcagcttgagaagatggagtcg

SEQ ID NO: 39879 - DNA, 47 bp, Emericella nidulans
gttctcgagacgagcgatcgcgtctgcagtagcagagagggcattga

SEQ ID NO: 39880 - DNA, 48 bp, Emericella nidulans
gaattcactgcggccgccatggagaagctgatctccgacggagcgagt

SEQ ID NO: 39881 - DNA, 41 bp, Emericella nidulans
gttctcgagacgagcgatcgctccgccccgtacctcagcag

SEQ ID NO: 39882 - DNA, 41 bp, Emericella nidulans
gaattcactgcggccgccatgctaggcgtcccagctatcac

SEQ ID NO: 39883 - DNA, 41 bp, Emericella nidulans
gttctcgagacgagcgatcgcttgatcttggcttgggtcat

SEQ ID NO: 39884 - DNA, 44 bp, Emericella nidulans
gaattcactgcggccgccatgaactatagaaatgcgctgaaagc

SEQ ID NO: 39885 - DNA, 41 bp, Emericella nidulans
gttctcgagacgagcgatcgcgggagcaatccgggaaatac

SEQ ID NO: 39886 - DNA, 45 bp, Emericella nidulans
gaattcactgcggccgccatgcacggcgcagataagaagctttcc

SEQ ID NO: 39887 - DNA, 44 bp, Emericella nidulans
gttctcgagacgagcgatcgcttggaggggttccgaactcgatg

SEQ ID NO: 39888 - DNA, 45 bp, Emericella nidulans
gaattcactgcggccgccatgctgtcgtcattaagcgcatggtca

SEQ ID NO: 39889 - DNA, 46 bp, Emericella nidulans
gttctcgagacgagcgatcgctcctacgttcgtcttctcaagtggc

SEQ ID NO: 39890 - DNA, 41 bp, Emericella nidulans
gaattcactgcggccgccatgatggtcggagatgcacagat

SEQ ID NO: 39891 - DNA, 42 bp, Emericella nidulans
gttctcgagacgagcgatcgcgatcttcccgaggaaagttga

SEQ ID NO: 39892 - DNA, 41 bp, Emericella nidulans
gaattcactgcggccgccatgggtagcggatcagctctttg

SEQ ID NO: 39893 - DNA, 44 bp, Emericella nidulans
gttctcgagacgagcgatcgcaagacggaagttgatgataccac

SEQ ID NO: 39894 - DNA, 47 bp, Emericella nidulans
gaattcactgcggccgccatgcagatgacaactttcgacttgaacga

SEQ ID NO: 39895 - DNA, 49 bp, Emericella nidulans
gttctcgagacgagcgatcgctacatcaaactcaatcgtaccccagttt

SEQ ID NO: 39896 - DNA, 41 bp, Emericella nidulans
gaattcactgcggccgccatggtgatgaaggacagcaagca

SEQ ID NO: 39897 - DNA, 41 bp, Emericella nidulans
gttctcgagacgagcgatcgcgaggcgaaaggtgattgaga

SEQ ID NO: 39898 - DNA, 40 bp, Emericella nidulans
gaattcactgcggccgccatgatcggcatccgccgttgaa

SEQ ID NO: 39899 - DNA, 47 bp, Emericella nidulans
gttctcgagacgagcgatcgcatcaacacacaggatcgctttcagca

SEQ ID NO: 39900 - DNA, 46 bp, Emericella nidulans
gaattcactgcggccgccatgcgtcttacatgcgatcgaaacatcc

SEQ ID NO: 39901 - DNA, 43 bp, Emericella nidulans
gttctcgagacgagcgatcgcccagactaccctcgggccgaat

SEQ ID NO: 39902 - DNA, 41 bp, Emericella nidulans
gaattcactgcggccgccatgtctcgatggccccgttctcc

SEQ ID NO: 39903 - DNA, 41 bp, Emericella nidulans
gttctcgagacgagcgatcgctgccacaatgcctgccctca

SEQ ID NO: 39904 - DNA, 43 bp, Emericella nidulans
gaattcactgcggccgccatgtccccacccacgaagaccatgt

SEQ ID NO: 39905 - DNA, 43 bp, Emericella nidulans
gttctcgagacgagcgatcgcgacgaggaacttggccttgacc

SEQ ID NO: 39906 - DNA, 45 bp, Emericella nidulans
gaattcactgcggccgccatgcatcatcgtcctctacccgcagac

SEQ ID NO: 39907 - DNA, 44 bp, Emericella nidulans
gttctcgagacgagcgatcgccggacggggtcagcagtacattc

SEQ ID NO: 39908 - DNA, 49 bp, Emericella nidulans
gaattcactgcggccgccatgtctaaccaatctcttctcgcacaggacc

SEQ ID NO: 39909 - DNA, 49 bp, Emericella nidulans
gttctcgagacgagcgatcgctttttgtcattgtcacggacagcgcctc

SEQ ID NO: 39910 - DNA, 43 bp, Emericella nidulans
gaattcactgcggccgccatgcggtcttcacagatcccggtcc

SEQ ID NO: 39911 - DNA, 48 bp, Emericella nidulans
gttctcgagacgagcgatcgccagcaaaacagcgacgtgtaaatgagg

SEQ ID NO: 39912 - DNA, 49 bp, Emericella nidulans
gaattcactgcggccgccatgttaagaaaacaggagtcaagctggggtt

SEQ ID NO: 39913 - DNA, 41 bp, Emericella nidulans
gttctcgagacgagcgatcgccaaaagcatgcggcgagggt

SEQ ID NO: 39914 - DNA, 41 bp, Emericella nidulans
gaattcactgcggccgccatggccatctacacctccggtaa

SEQ ID NO: 39915 - DNA, 41 bp, Emericella nidulans
gttctcgagacgagcgatcgcatggcttccagttgacgaac

SEQ ID NO: 39916 - DNA, 47 bp, Emericella nidulans
gaattcactgcggccgccatgctctactgtgcctcacatctccatca

SEQ ID NO: 39917 - DNA, 49 bp, Emericella nidulans
gttctcgagacgagcgatcgctagctaaaagatgatgtgtctccgttcc

SEQ ID NO: 39918 - DNA, 46 bp, Emericella nidulans
gaattcactgcggccgccatgtcatggtcctcttcgtgctgtatca

SEQ ID NO: 39919 - DNA, 42 bp, Emericella nidulans
gttctcgagacgagcgatcgcaacacccgagtgcggtgtcta

SEQ ID NO: 39920 - DNA, 42 bp, Emericella nidulans
gaattcactgcggccgccatgcttctgacgatgctaaggcta

SEQ ID NO: 39921 - DNA, 41 bp, Emericella nidulans
gttctcgagacgagcgatcgcaccttgagcaacagcctcat

SEQ ID NO: 39922 - DNA, 49 bp, Emericella nidulans
gaattcactgcggccgccatgtaacctttcatccttaatatggcgtctg

SEQ ID NO: 39923 - DNA, 44 bp, Emericella nidulans
gttctcgagacgagcgatcgcgcatcactgcctacctaccgttg

SEQ ID NO: 39924 - DNA, 42 bp, Emericella nidulans
gaattcactgcggccgccatgccagcatgcatggagcgaagc

SEQ ID NO: 39925 - DNA, 42 bp, Emericella nidulans
gttctcgagacgagcgatcgcgcaacaccattgggaccgagt

SEQ ID NO: 39926 - DNA, 44 bp, Emericella nidulans
gaattcactgcggccgccatggcgacgccctgatctctctttgg

SEQ ID NO: 39927 - DNA, 41 bp, Emericella nidulans
gttctcgagacgagcgatcgcggcggcccctacgatcctca

SEQ ID NO: 39928 - DNA, 48 bp, Emericella nidulans
gaattcactgcggccgccatgagttcgttgctaacacacatcgcaatc

SEQ ID NO: 39929 - DNA, 49 bp, Emericella nidulans
gttctcgagacgagcgatcgcaacagagtcgagaatagctttggacaca

SEQ ID NO: 39930 - DNA, 47 bp, Emericella nidulans
gaattcactgcggccgccatggatatccccaaagctcaacacggaga

SEQ ID NO: 39931 - DNA, 45 bp, Emericella nidulans
gttctcgagacgagcgatcgcggccttcataatctgctccaccgt

SEQ ID NO: 39932 - DNA, 41 bp, Emericella nidulans
gaattcactgcggccgccatgggctcgcctaccacacttac

SEQ ID NO: 39933 - DNA, 49 bp, Emericella nidulans
gttctcgagacgagcgatcgcaactaacttttcaggatatttcgccaag

SEQ ID NO: 39934 - DNA, 49 bp, Emericella nidulans
gaattcactgcggccgccatgcctacacagaacaatgctcaaccaaacc

SEQ ID NO: 39935 - DNA, 42 bp, Emericella nidulans
gttctcgagacgagcgatcgcttgttgcgggggcatatggtg

SEQ ID NO: 39936 - DNA, 46 bp, Emericella nidulans
gaattcactgcggccgccatgtccacgcctgtgtttacttcatcca

SEQ ID NO: 39937 - DNA, 49 bp, Emericella nidulans
gttctcgagacgagcgatcgccgaagagagaatcccttcctctttccct

SEQ ID NO: 39938 - DNA, 42 bp, Emericella nidulans
gaattcactgcggccgccatgcgcattactcatctccaggtc

SEQ ID NO: 39939 - DNA, 41 bp, Emericella nidulans
gttctcgagacgagcgatcgccgacaacccagaaacaatca

SEQ ID NO: 39940 - DNA, 47 bp, Emericella nidulans
gaattcactgcggccgccatgtcatttcataacgtttcatctagaca

SEQ ID NO: 39941 - DNA, 40 bp, Emericella nidulans
gttctcgagacgagcgatcgccccggcatattgttctgac

SEQ ID NO: 39942 - DNA, 41 bp, Emericella nidulans
gaattcactgcggccgccatgctacgcagcacccgcagcct

SEQ ID NO: 39943 - DNA, 43 bp, Emericella nidulans
gttctcgagacgagcgatcgcgctcgacctcgtttgccttgtc

SEQ ID NO: 39944 - DNA, 41 bp, Emericella nidulans
gaattcactgcggccgccatgggaagatcttgttcgccttg

SEQ ID NO: 39945 - DNA, 41 bp, Emericella nidulans
gttctcgagacgagcgatcgccaaataggcgttggataccg

SEQ ID NO: 39946 - DNA, 41 bp, Emericella nidulans
gaattcactgcggccgccatgtgcgcagggcttgtccctct

SEQ ID NO: 39947 - DNA, 46 bp, Emericella nidulans
gttctcgagacgagcgatcgccaaaatgcagttgcatcggtcttgc

SEQ ID NO: 39948 - DNA, 41 bp, Emericella nidulans
gaattcactgcggccgccatgcggtgctgtcggcaaggtga

SEQ ID NO: 39949 - DNA, 44 bp, Emericella nidulans
gttctcgagacgagcgatcgcgggtcgtctcgcaaatcgagctt

SEQ ID NO: 39950 - DNA, 49 bp, Emericella nidulans
gaattcactgcggccgccatgatgatgcttttcgagtcattggtgaacg

SEQ ID NO: 39951 - DNA, 49 bp, Emericella nidulans
gttctcgagacgagcgatcgcgagtatgagcgtgtggagattcttctgg

SEQ ID NO: 39952 - DNA, 48 bp, Emericella nidulans
gaattcactgcggccgccatgcttggggatcagacgaatatggtattg

SEQ ID NO: 39953 - DNA, 47 bp, Emericella nidulans
gttctcgagacgagcgatcgctaggaattggacttgtgcttgggctc

SEQ ID NO: 39954 - DNA, 44 bp, Emericella nidulans
gaattcactgcggccgccatgttctgggatgtttctggcaccaa

SEQ ID NO: 39955 - DNA, 49 bp, Emericella nidulans
gttctcgagacgagcgatcgccgaggataaggtattcccagcttagtcg

SEQ ID NO: 39956 - DNA, 44 bp, Emericella nidulans
gaattcactgcggccgccatggcaagcccattcacaagctcgat

SEQ ID NO: 39957 - DNA, 49 bp, Emericella nidulans
gttctcgagacgagcgatcgcttgcttgataatcttctcaatgctctca

SEQ ID NO: 39958 - DNA, 40 bp, Emericella nidulans
gaattcactgcggccgccatgggctggtctcaacggtctg

SEQ ID NO: 39959 - DNA, 41 bp, Emericella nidulans
gttctcgagacgagcgatcgcaactcttgggacgctcgata

SEQ ID NO: 39960 - DNA, 43 bp, Emericella nidulans
gaattcactgcggccgccatgcgtgggtcaaaacagcatttcg

SEQ ID NO: 39961 - DNA, 49 bp, Emericella nidulans
gttctcgagacgagcgatcgctacctcatcccaataggaacttcagcct

SEQ ID NO: 39962 - DNA, 47 bp, Emericella nidulans
gaattcactgcggccgccatgacaggcagcagttatatagtgtgttc

SEQ ID NO: 39963 - DNA, 40 bp, Emericella nidulans
gttctcgagacgagcgatcgccagcaatgccagagtgacc

SEQ ID NO: 39964 - DNA, 49 bp, Emericella nidulans
gaattcactgcggccgccatgaactacgccaggatagtcttaaccgagt

SEQ ID NO: 39965 - DNA, 49 bp, Emericella nidulans
gttctcgagacgagcgatcgcccaaatcttgatggagttaagcatctcg

SEQ ID NO: 39966 - DNA, 41 bp, Emericella nidulans
gaattcactgcggccgccatgccggatccagtcattacctc

SEQ ID NO: 39967 - DNA, 48 bp, Emericella nidulans
gttctcgagacgagcgatcgcgtttctaataagactttccgtgttttt

SEQ ID NO: 39968 - DNA, 41 bp, Emericella nidulans
gaattcactgcggccgccatgagctcaagcctttgacggta

SEQ ID NO: 39969 - DNA, 48 bp, Emericella nidulans
gttctcgagacgagcgatcgcattatctaaacagcagtcaaccgattt

SEQ ID NO: 39970 - DNA, 41 bp, Emericella nidulans
gaattcactgcggccgccatggtgcgagcaacgccgctaca

SEQ ID NO: 39971 - DNA, 48 bp, Emericella nidulans
gttctcgagacgagcgatcgccagacgggtcatagacatcaccgtcaa

SEQ ID NO: 39972 - DNA, 48 bp, Emericella nidulans
gaattcactgcggccgccatgccgttcagatcatggtcctatcgtggt

SEQ ID NO: 39973 - DNA, 47 bp, Emericella nidulans
gttctcgagacgagcgatcgctcgatcatctccgaatgcagtttgac

SEQ ID NO: 39974 - DNA, 41 bp, Emericella nidulans
gaattcactgcggccgccatgcttctccgccgaagaagcta

SEQ ID NO: 39975 - DNA, 41 bp, Emericella nidulans
gttctcgagacgagcgatcgcaggttgtttgatggccagat

SEQ ID NO: 39976 - DNA, 49 bp, Emericella nidulans
gaattcactgcggccgccatgtattctaagaatggcctctgtcacatcc

SEQ ID NO: 39977 - DNA, 41 bp, Emericella nidulans
gttctcgagacgagcgatcgctgtcgacgggcaccaaatgc

SEQ ID NO: 39978 - DNA, 43 bp, Emericella nidulans
gaattcactgcggccgccatgggggctctgatgtaggcgcaga

SEQ ID NO: 39979 - DNA, 45 bp, Emericella nidulans
gttctcgagacgagcgatcgccttggagcttgacccattctctcg

SEQ ID NO: 39980 - DNA, 41 bp, Emericella nidulans
gaattcactgcggccgccatgataggactcatccgcgacaa

SEQ ID NO: 39981 - DNA, 45 bp, Emericella nidulans
gttctcgagacgagcgatcgcatggtctaatcaacaactggagtg

SEQ ID NO: 39982 - DNA, 41 bp, Emericella nidulans
gaattcactgcggccgccatggcaagtcccgtcgcccactc

SEQ ID NO: 39983 - DNA, 49 bp, Emericella nidulans
gttctcgagacgagcgatcgcagaaactcctttggtagacccgtctgga

SEQ ID NO: 39984 - DNA, 41 bp, Emericella nidulans
gaattcactgcggccgccatggggcaagggagttgcgaacc

SEQ ID NO: 39985 - DNA, 49 bp, Emericella nidulans
gttctcgagacgagcgatcgctttaaattcagagccggtcaatctctgc

SEQ ID NO: 39986 - DNA, 41 bp, Emericella nidulans
gaattcactgcggccgccatgtatgcccctgccgctgggta

SEQ ID NO: 39987 - DNA, 41 bp, Emericella nidulans
gttctcgagacgagcgatcgcggagctcgcgcctggagttg

SEQ ID NO: 39988 - DNA, 39 bp, Emericella nidulans
gaattcactgcggccgccatgcatgtcgacggcacagag

SEQ ID NO: 39989 - DNA, 42 bp, Emericella nidulans
gttctcgagacgagcgatcgcgtgcacgtacttcttctcctc

SEQ ID NO: 39990 - DNA, 44 bp, Emericella nidulans
gaattcactgcggccgccatggcaaacgtcgctttgattggatg

SEQ ID NO: 39991 - DNA, 49 bp, Emericella nidulans
gttctcgagacgagcgatcgctcccatgttgaataatatcactgccata

SEQ ID NO: 39992 - DNA, 44 bp, Emericella nidulans
gaattcactgcggccgccatgttattgggtgtggattgggagcc

SEQ ID NO: 39993 - DNA, 49 bp, Emericella nidulans
gttctcgagacgagcgatcgcaactacccaatcatgctcctcttccttc

SEQ ID NO: 39994 - DNA, 47 bp, Emericella nidulans
gaattcactgcggccgccatggccaacatgaaggaagctattgtccc

SEQ ID NO: 39995 - DNA, 40 bp, Emericella nidulans
gttctcgagacgagcgatcgcggccggcaatggcgatgat

SEQ ID NO: 39996 - DNA, 46 bp, Emericella nidulans
gaattcactgcggccgccatggaaacgagcgcagtatctacccaga

SEQ ID NO: 39997 - DNA, 46 bp, Emericella nidulans
gttctcgagacgagcgatcgcttcttcctctaggccaaggctggat

SEQ ID NO: 39998 - DNA, 41 bp, Emericella nidulans
gaattcactgcggccgccatgggtgcctcccagccagcaga

SEQ ID NO: 39999 - DNA, 45 bp, Emericella nidulans
gttctcgagacgagcgatcgccatcaacagcgcctcagattcacg

SEQ ID NO: 40000 - DNA, 41 bp, Emericella nidulans
gaattcactgcggccgccatgaccgcaggcatgggaacagc

SEQ ID NO: 40001 - DNA, 41 bp, Emericella nidulans
gttctcgagacgagcgatcgcagcaccgccgcaagaccaac

SEQ ID NO: 40002 - DNA, 49 bp, Emericella nidulans
gaattcactgcggccgccatggaccaccgttatcattctcggtaattca

SEQ ID NO: 40003 - DNA, 45 bp, Emericella nidulans
gttctcgagacgagcgatcgctggcaatacggttgttgtccgttt

SEQ ID NO: 40004 - DNA, 49 bp, Emericella nidulans
gaattcactgcggccgccatgctacgatgacctttttagagcctgggat

SEQ ID NO: 40005 - DNA, 45 bp, Emericella nidulans
gttctcgagacgagcgatcgctcacgctcgacacgtctaacttcg

SEQ ID NO: 40006 - DNA, 46 bp, Emericella nidulans
gaattcactgcggccgccatgctggttacagttccttcgcatctga

SEQ ID NO: 40007 - DNA, 49 bp, Emericella nidulans
gttctcgagacgagcgatcgctcacttctgttcttcacaaagttctcca

SEQ ID NO: 40008 - DNA, 44 bp, Emericella nidulans
gaattcactgcggccgccatgtattattcccttggcggctatgc

SEQ ID NO: 40009 - DNA, 44 bp, Emericella nidulans
gttctcgagacgagcgatcgcgctcctgccagtgcagccgacat

SEQ ID NO: 40010 - DNA, 47 bp, Emericella nidulans
gaattcactgcggccgccatgtggcaatttcgagaagcacttcctta

SEQ ID NO: 40011 - DNA, 49 bp, Emericella nidulans
gttctcgagacgagcgatcgcgatgatagacagctgtgtccagggcttg

SEQ ID NO: 40012 - DNA, 49 bp, Emericella nidulans
gaattcactgcggccgccatgtctagagattaatatagagcagccccta

SEQ ID NO: 40013 - DNA, 42 bp, Emericella nidulans
gttctcgagacgagcgatcgcaaaaataaggaggcatgcaga

SEQ ID NO: 40014 - DNA, 41 bp, Emericella nidulans
gaattcactgcggccgccatgtgggacggcgagagtgatcc

SEQ ID NO: 40015 - DNA, 41 bp, Emericella nidulans
gttctcgagacgagcgatcgccgcttcaggagcgtcggagg

SEQ ID NO: 40016 - DNA, 49 bp, Emericella nidulans
gaattcactgcggccgccatgcggtatttcaacaccaccaagacctctg

SEQ ID NO: 40017 - DNA, 48 bp, Emericella nidulans
gttctcgagacgagcgatcgcgtcagccgtggtcaataatctttaggg

SEQ ID NO: 40018 - DNA, 42 bp, Emericella nidulans
gaattcactgcggccgccatgcatgtattccgcagaccagtt

SEQ ID NO: 40019 - DNA, 41 bp, Emericella nidulans
gttctcgagacgagcgatcgcgagcccaaacctgcgtaata

SEQ ID NO: 40020 - DNA, 41 bp, Emericella nidulans
gaattcactgcggccgccatgtggaaacggtctccttggta

SEQ ID NO: 40021 - DNA, 41 bp, Emericella nidulans
gttctcgagacgagcgatcgctagaccttgcgcacatcaac

SEQ ID NO: 40022 - DNA, 47 bp, Emericella nidulans
gaattcactgcggccgccatgatacgcacacttctactgtgatcttc

SEQ ID NO: 40023 - DNA, 41 bp, Emericella nidulans
gttctcgagacgagcgatcgccgcttcagccatcaactctt

SEQ ID NO: 40024 - DNA, 41 bp, Emericella nidulans
gaattcactgcggccgccatgcgctcaaacttgtcatccac

SEQ ID NO: 40025 - DNA, 41 bp, Emericella nidulans
gttctcgagacgagcgatcgctctccagttcctcacgttcc

SEQ ID NO: 40026 - DNA, 42 bp, Emericella nidulans
gaattcactgcggccgccatggcccagaaatgcaggctcctt

SEQ ID NO: 40027 - DNA, 48 bp, Emericella nidulans
gttctcgagacgagcgatcgcgcgaataacaaagtatccgcccggacc

SEQ ID NO: 40028 - DNA, 49 bp, Emericella nidulans
gaattcactgcggccgccatgcgtgcagatcatctataacgccgggctc

SEQ ID NO: 40029 - DNA, 45 bp, Emericella nidulans
gttctcgagacgagcgatcgctctccctcatgaacggactactgc

SEQ ID NO: 40030 - DNA, 47 bp, Emericella nidulans
gaattcactgcggccgccatgttcttttcgggtctccttccttacga

SEQ ID NO: 40031 - DNA, 41 bp, Emericella nidulans
gttctcgagacgagcgatcgccgcgacgatgttgcgcttct

SEQ ID NO: 40032 - DNA, 41 bp, Emericella nidulans
gaattcactgcggccgccatgggcggatggctatgcacggt

SEQ ID NO: 40033 - DNA, 44 bp, Emericella nidulans
gttctcgagacgagcgatcgcctttgccgagtctgagggactgc

SEQ ID NO: 40034 - DNA, 42 bp, Emericella nidulans
gaattcactgcggccgccatgccacagcttccaccccggata

SEQ ID NO: 40035 - DNA, 41 bp, Emericella nidulans
gttctcgagacgagcgatcgcttaccaccgccccaagggtg

SEQ ID NO: 40036 - DNA, 48 bp, Emericella nidulans
gaattcactgcggccgccatgtcctcgaagatcgtctttttgagcaga

SEQ ID NO: 40037 - DNA, 49 bp, Emericella nidulans
gttctcgagacgagcgatcgccctcctagttgtgatgttgatttgatgc

SEQ ID NO: 40038 - DNA, 41 bp, Emericella nidulans
gaattcactgcggccgccatggacgaagcagcagaaagacc

SEQ ID NO: 40039 - DNA, 41 bp, Emericella nidulans
gttctcgagacgagcgatcgccacgaccaggatcgtactct

SEQ ID NO: 40040 - DNA, 46 bp, Emericella nidulans
gaattcactgcggccgccatggacgaatgcccatgttatcctggaa

SEQ ID NO: 40041 - DNA, 41 bp, Emericella nidulans
gttctcgagacgagcgatcgcaccagcccgccacaaagcct

SEQ ID NO: 40042 - DNA, 41 bp, Emericella nidulans
gaattcactgcggccgccatgtcgaaggagtggaaggagtc

SEQ ID NO: 40043 - DNA, 45 bp, Emericella nidulans
gttctcgagacgagcgatcgcgtcaacatgctggatattgtattc

SEQ ID NO: 40044 - DNA, 49 bp, Emericella nidulans
gaattcactgcggccgccatgtagcaagaaatacgagcaactgggtatc

SEQ ID NO: 40045 - DNA, 42 bp, Emericella nidulans
gttctcgagacgagcgatcgctcctcgacctgctttgggtcc

SEQ ID NO: 40046 - DNA, 42 bp, Emericella nidulans
gaattcactgcggccgccatgtgcggattccaaccagagacg

SEQ ID NO: 40047 - DNA, 43 bp, Emericella nidulans
gttctcgagacgagcgatcgcgcaacaacctccgcctaaacca

SEQ ID NO: 40048 - DNA, 40 bp, Emericella nidulans
gaattcactgcggccgccatggccaaccgtccttctccta

SEQ ID NO: 40049 - DNA, 41 bp, Emericella nidulans
gttctcgagacgagcgatcgcgctccgttgccataacatct

SEQ ID NO: 40050 - DNA, 43 bp, Emericella nidulans
gaattcactgcggccgccatgtgccgccgacatttcagaaaaa

SEQ ID NO: 40051 - DNA, 41 bp, Emericella nidulans
gttctcgagacgagcgatcgcacgcagcggccaccatcaat

SEQ ID NO: 40052 - DNA, 44 bp, Emericella nidulans
gaattcactgcggccgccatgcccccttccaagtttagcgtacc

SEQ ID NO: 40053 - DNA, 43 bp, Emericella nidulans
gttctcgagacgagcgatcgccagtccagcagcgctaacaagg

SEQ ID NO: 40054 - DNA, 41 bp, Emericella nidulans
gaattcactgcggccgccatggatggtgcagtcgcgggaga

SEQ ID NO: 40055 - DNA, 42 bp, Emericella nidulans
gttctcgagacgagcgatcgccgcgctcagcccataatttgc

SEQ ID NO: 40056 - DNA, 49 bp, Emericella nidulans
gaattcactgcggccgccatggtatcggaggactgggagttattccttg

SEQ ID NO: 40057 - DNA, 41 bp, Emericella nidulans
gttctcgagacgagcgatcgcttctccgccgccgctagttg

SEQ ID NO: 40058 - DNA, 41 bp, Emericella nidulans
gaattcactgcggccgccatgggttgcggcggcttgaagag

SEQ ID NO: 40059 - DNA, 41 bp, Emericella nidulans
gttctcgagacgagcgatcgcgtctcccgcgcccctctcat

SEQ ID NO: 40060 - DNA, 48 bp, Emericella nidulans
gaattcactgcggccgccatgaacagacgatggcgtcgttgatgcaaa

SEQ ID NO: 40061 - DNA, 44 bp, Emericella nidulans
gttctcgagacgagcgatcgcaacattcaggacagccacagacg

SEQ ID NO: 40062 - DNA, 41 bp, Emericella nidulans
gaattcactgcggccgccatgcacaatcgggtgggcggagt

SEQ ID NO: 40063 - DNA, 41 bp, Emericella nidulans
gttctcgagacgagcgatcgcccgcggcgatgcagtctttt

SEQ ID NO: 40064 - DNA, 48 bp, Emericella nidulans
gaattcactgcggccgccatgcccagtaatcactgttcaccgtcaatc

SEQ ID NO: 40065 - DNA, 44 bp, Emericella nidulans
gttctcgagacgagcgatcgcccgagtcaacctcctcctggtca

SEQ ID NO: 40066 - DNA, 41 bp, Emericella nidulans
gaattcactgcggccgccatgcgtcagaacccttccatgtt

SEQ ID NO: 40067 - DNA, 41 bp, Emericella nidulans
gttctcgagacgagcgatcgccagcggaggtcacttctttc

SEQ ID NO: 40068 - DNA, 41 bp, Emericella nidulans
gaattcactgcggccgccatggccgccgaggagccagctaa

SEQ ID NO: 40069 - DNA, 41 bp, Emericella nidulans
gttctcgagacgagcgatcgccgttcagcaacggcgacagg

SEQ ID NO: 40070 - DNA, 41 bp, Emericella nidulans
gaattcactgcggccgccatggtgcgggagaaggcggacaa

SEQ ID NO: 40071 - DNA, 44 bp, Emericella nidulans
gttctcgagacgagcgatcgcgcgagcccaggtagttctgatcc

SEQ ID NO: 40072 - DNA, 41 bp, Emericella nidulans
gaattcactgcggccgccatggacgccgacgcagagatgga

SEQ ID NO: 40073 - DNA, 47 bp, Emericella nidulans
gttctcgagacgagcgatcgcaaggagtaccaaagacaccagcagca

SEQ ID NO: 40074 - DNA, 49 bp, Emericella nidulans
gaattcactgcggccgccatgaatgtaaatcttgcgattgcttgcaggt

SEQ ID NO: 40075 - DNA, 42 bp, Emericella nidulans
gttctcgagacgagcgatcgcctccggggcaaagtaagtggc

SEQ ID NO: 40076 - DNA, 45 bp, Emericella nidulans
gaattcactgcggccgccatgaacccatggctacgacctctcacc

SEQ ID NO: 40077 - DNA, 42 bp, Emericella nidulans
gttctcgagacgagcgatcgctggtgcttgtgctggctgcaa

SEQ ID NO: 40078 - DNA, 49 bp, Emericella nidulans
gaattcactgcggccgccatgaaaaccaatcaccctcaactatccacca

SEQ ID NO: 40079 - DNA, 49 bp, Emericella nidulans
gttctcgagacgagcgatcgcaaattgctggttaccaaagtaggcactg

SEQ ID NO: 40080 - DNA, 46 bp, Emericella nidulans
gaattcactgcggccgccatgctataaagtcggtaaacctgggaaa

SEQ ID NO: 40081 - DNA, 44 bp, Emericella nidulans
gttctcgagacgagcgatcgcccttaatatcatctgaggcagga

SEQ ID NO: 40082 - DNA, 49 bp, Emericella nidulans
gaattcactgcggccgccatgcagagactatgtacctgttgagatctgt

SEQ ID NO: 40083 - DNA, 48 bp, Emericella nidulans
gttctcgagacgagcgatcgcaatggtcaacctcgacattgagtttat

SEQ ID NO: 40084 - DNA, 43 bp, Emericella nidulans
gaattcactgcggccgccatgacttgggcgtttctttcgcaga

SEQ ID NO: 40085 - DNA, 46 bp, Emericella nidulans
gttctcgagacgagcgatcgcaattcgtcaacacttggcggcggta

SEQ ID NO: 40086 - DNA, 46 bp, Emericella nidulans
gaattcactgcggccgccatgtagagttcgctgtcgcgctattagg

SEQ ID NO: 40087 - DNA, 46 bp, Emericella nidulans
gttctcgagacgagcgatcgccaatcccttacgctgatcaccatcc

SEQ ID NO: 40088 - DNA, 41 bp, Emericella nidulans
gaattcactgcggccgccatgcaatggctcattgtcaggtg

SEQ ID NO: 40089 - DNA, 44 bp, Emericella nidulans
gttctcgagacgagcgatcgcggataacgatttgttctgtttcg

SEQ ID NO: 40090 - DNA, 43 bp, Emericella nidulans
gaattcactgcggccgccatggcccgaatcatcgtctgccaac

SEQ ID NO: 40091 - DNA, 48 bp, Emericella nidulans
gttctcgagacgagcgatcgcaatacctcgttctctttctcgcggtca

SEQ ID NO: 40092 - DNA, 45 bp, Emericella nidulans
gaattcactgcggccgccatggccgcatactgacagcctgtcttc

SEQ ID NO: 40093 - DNA, 46 bp, Emericella nidulans
gttctcgagacgagcgatcgcgattctgagacgtgcggaaggaacc

SEQ ID NO: 40094 - DNA, 41 bp, Emericella nidulans
gaattcactgcggccgccatgcatgccctttggtgattttg

SEQ ID NO: 40095 - DNA, 41 bp, Emericella nidulans
gttctcgagacgagcgatcgcgcgacccaaagacttccata

SEQ ID NO: 40096 - DNA, 42 bp, Emericella nidulans
gaattcactgcggccgccatgaggtatgtatccctcgttctg

SEQ ID NO: 40097 - DNA, 42 bp, Emericella nidulans
gttctcgagacgagcgatcgcgccttgtacatgatccgactt

SEQ ID NO: 40098 - DNA, 41 bp, Emericella nidulans
gaattcactgcggccgccatggctcggtagggaaggaaatc

SEQ ID NO: 40099 - DNA, 41 bp, Emericella nidulans
gttctcgagacgagcgatcgcaaagccagactatgcacgag

SEQ ID NO: 40100 - DNA, 43 bp, Emericella nidulans
gaattcactgcggccgccatgggtctgctgttcgtggctgcaa

SEQ ID NO: 40101 - DNA, 40 bp, Emericella nidulans
gttctcgagacgagcgatcgccagcggtgggcggacgata

SEQ ID NO: 40102 - DNA, 41 bp, Emericella nidulans
gaattcactgcggccgccatgaacgtgggggctatagaagc

SEQ ID NO: 40103 - DNA, 45 bp, Emericella nidulans
gttctcgagacgagcgatcgccagtttctgaaagaggtgatgttt

SEQ ID NO: 40104 - DNA, 41 bp, Emericella nidulans
gaattcactgcggccgccatgtgggtctccccagccgggtc

SEQ ID NO: 40105 - DNA, 45 bp, Emericella nidulans
gttctcgagacgagcgatcgcactctgcagctgccacactcttcc

SEQ ID NO: 40106 - DNA, 41 bp, Emericella nidulans
gaattcactgcggccgccatgcggcagctcaggtggacgaa

SEQ ID NO: 40107 - DNA, 42 bp, Emericella nidulans
gttctcgagacgagcgatcgcacggttctggagcgccacctt

SEQ ID NO: 40108 - DNA, 42 bp, Emericella nidulans
gaattcactgcggccgccatggctcacgtggctgtggatgtc

SEQ ID NO: 40109 - DNA, 44 bp, Emericella nidulans
gttctcgagacgagcgatcgccgggtcgccatagactgatcgaa

SEQ ID NO: 40110 - DNA, 47 bp, Emericella nidulans
gaattcactgcggccgccatgaataatgcttacaattggataggagc

SEQ ID NO: 40111 - DNA, 39 bp, Emericella nidulans
gttctcgagacgagcgatcgccatttgcgctccaggatt

SEQ ID NO: 40112 - DNA, 42 bp, Emericella nidulans
gaattcactgcggccgccatgcatcctcctctcccgagtcca

SEQ ID NO: 40113 - DNA, 42 bp, Emericella nidulans
gttctcgagacgagcgatcgcgcgccttgtcgaaccgaatcc

SEQ ID NO: 40114 - DNA, 49 bp, Emericella nidulans
gaattcactgcggccgccatggtatttggtcgcatattcccagcccaga

SEQ ID NO: 40115 - DNA, 48 bp, Emericella nidulans
gttctcgagacgagcgatcgccgttctattcttcctcttcccaatcca

SEQ ID NO: 40116 - DNA, 48 bp, Emericella nidulans
gaattcactgcggccgccatgtctaaagtacttcctgtgctagctctc

SEQ ID NO: 40117 - DNA, 41 bp, Emericella nidulans
gttctcgagacgagcgatcgccaagtcgttgcgcacaatag

SEQ ID NO: 40118 - DNA, 41 bp, Emericella nidulans
gaattcactgcggccgccatgcgtcgaatttgaaacccact

SEQ ID NO: 40119 - DNA, 48 bp, Emericella nidulans
gttctcgagacgagcgatcgcgaaaagtgactaaccttcttgaaactg

SEQ ID NO: 40120 - DNA, 44 bp, Emericella nidulans
gaattcactgcggccgccatgcgatgaagatggcactgaaagca

SEQ ID NO: 40121 - DNA, 43 bp, Emericella nidulans
gttctcgagacgagcgatcgccgcgcattttctgaaccgcatc

SEQ ID NO: 40122 - DNA, 47 bp, Emericella nidulans
gaattcactgcggccgccatggacatgcagattgggtataccgtggc

SEQ ID NO: 40123 - DNA, 42 bp, Emericella nidulans
gttctcgagacgagcgatcgctgcgcgttcttcagcagttcg

SEQ ID NO: 40124 - DNA, 41 bp, Emericella nidulans
gaattcactgcggccgccatgccgcgttttatgcggcgaga

SEQ ID NO: 40125 - DNA, 43 bp, Emericella nidulans
gttctcgagacgagcgatcgcccttccgaacccaaaccaacca

SEQ ID NO: 40126 - DNA, 48 bp, Emericella nidulans
gaattcactgcggccgccatgtggtcaatggtgaccttattcagattc

SEQ ID NO: 40127 - DNA, 49 bp, Emericella nidulans
gttctcgagacgagcgatcgctgttcatctctaagtacgtcctgaccaa

SEQ ID NO: 40128 - DNA, 41 bp, Emericella nidulans
gaattcactgcggccgccatggagaaagcgttgttccaagg

SEQ ID NO: 40129 - DNA, 41 bp, Emericella nidulans
gttctcgagacgagcgatcgcaagctggttctgcagtctcg

SEQ ID NO: 40130 - DNA, 47 bp, Emericella nidulans
gaattcactgcggccgccatgttggacagtccgcaataccattacca

SEQ ID NO: 40131 - DNA, 48 bp, Emericella nidulans
gttctcgagacgagcgatcgcctctaagcgtacggatgcccattttca

SEQ ID NO: 40132 - DNA, 41 bp, Emericella nidulans
gaattcactgcggccgccatgcaacaccgctggcaccgtga

SEQ ID NO: 40133 - DNA, 46 bp, Emericella nidulans
gttctcgagacgagcgatcgcagagctagcagcagcgagctcagtc

SEQ ID NO: 40134 - DNA, 49 bp, Emericella nidulans
gaattcactgcggccgccatgtacgatacctcatcacaaccacttagcc

SEQ ID NO: 40135 - DNA, 44 bp, Emericella nidulans
gttctcgagacgagcgatcgcacacgaccgccattattggtgaa

SEQ ID NO: 40136 - DNA, 49 bp, Emericella nidulans
gaattcactgcggccgccatgtattcttgcttatttcggaattgtgagc

SEQ ID NO: 40137 - DNA, 41 bp, Emericella nidulans
gttctcgagacgagcgatcgctgcgatggcagggcttgttg

SEQ ID NO: 40138 - DNA, 40 bp, Emericella nidulans
gaattcactgcggccgccatgtgccaagtgccttgagaac

SEQ ID NO: 40139 - DNA, 47 bp, Emericella nidulans
gttctcgagacgagcgatcgctctttattatccttcagacgtgagtt

SEQ ID NO: 40140 - DNA, 41 bp, Emericella nidulans
gaattcactgcggccgccatgtctttactcagggtgcctcc

SEQ ID NO: 40141 - DNA, 41 bp, Emericella nidulans
gttctcgagacgagcgatcgccagcgaggtcctcatttctc

SEQ ID NO: 40142 - DNA, 41 bp, Emericella nidulans
gaattcactgcggccgccatgggtttccaggctatgggatt

SEQ ID NO: 40143 - DNA, 41 bp, Emericella nidulans
gttctcgagacgagcgatcgcttttcctttagtcgcaggga

SEQ ID NO: 40144 - DNA, 46 bp, Emericella nidulans
gaattcactgcggccgccatgttttcaagctcttctacttctcatc

SEQ ID NO: 40145 - DNA, 41 bp, Emericella nidulans
gttctcgagacgagcgatcgctccattccgcagcttaactc

SEQ ID NO: 40146 - DNA, 41 bp, Emericella nidulans
gaattcactgcggccgccatgcacagtcgtgcgcaggctcc

SEQ ID NO: 40147 - DNA, 41 bp, Emericella nidulans
gttctcgagacgagcgatcgcggaacagccggtgccctcaa

SEQ ID NO: 40148 - DNA, 48 bp, Emericella nidulans
gaattcactgcggccgccatggtaagctcaaacctacataatagattg

SEQ ID NO: 40149 - DNA, 43 bp, Emericella nidulans
gttctcgagacgagcgatcgccatcgaagacacttgtcggtaa

SEQ ID NO: 40150 - DNA, 45 bp, Emericella nidulans
gaattcactgcggccgccatgccgacctctaacccgcaattaggc

SEQ ID NO: 40151 - DNA, 46 bp, Emericella nidulans
gttctcgagacgagcgatcgcaggcttaaccttccccaggcattca

SEQ ID NO: 40152 - DNA, 41 bp, Emericella nidulans
gaattcactgcggccgccatgcgcgcgtcgtgaaaatgacc

SEQ ID NO: 40153 - DNA, 48 bp, Emericella nidulans
gttctcgagacgagcgatcgcaaaaacgccagtccaaagtacgaggtg

SEQ ID NO: 40154 - DNA, 47 bp, Emericella nidulans
gaattcactgcggccgccatgaccccctcaggtcgttggtaataagc

SEQ ID NO: 40155 - DNA, 41 bp, Emericella nidulans
gttctcgagacgagcgatcgcccagccggtctcgccgtact

SEQ ID NO: 40156 - DNA, 44 bp, Emericella nidulans
gaattcactgcggccgccatgacgagtgctcggacgtgcattta

SEQ ID NO: 40157 - DNA, 41 bp, Emericella nidulans
gttctcgagacgagcgatcgccgttcgccccagaagattcg

SEQ ID NO: 40158 - DNA, 45 bp, Emericella nidulans
gaattcactgcggccgccatgtcggacacttcagaagctcgagga

SEQ ID NO: 40159 - DNA, 48 bp, Emericella nidulans
gttctcgagacgagcgatcgcccccaggaatagtaagttgctcaacca

SEQ ID NO: 40160 - DNA, 41 bp, Emericella nidulans
gaattcactgcggccgccatgaggccatccaaccgccaacc

SEQ ID NO: 40161 - DNA, 41 bp, Emericella nidulans
gttctcgagacgagcgatcgcgccgttggccctccttgaga

SEQ ID NO: 40162 - DNA, 41 bp, Emericella nidulans
gaattcactgcggccgccatgtgcgcaagctcgatgcagtg

SEQ ID NO: 40163 - DNA, 46 bp, Emericella nidulans
gttctcgagacgagcgatcgctccacagtactacaaaggcccacca

SEQ ID NO: 40164 - DNA, 42 bp, Emericella nidulans
gaattcactgcggccgccatgcgggtacacaggcgtcgtttc

SEQ ID NO: 40165 - DNA, 45 bp, Emericella nidulans
gttctcgagacgagcgatcgcgggtacaccacgaatccggaagtg

SEQ ID NO: 40166 - DNA, 41 bp, Emericella nidulans
gaattcactgcggccgccatgggctgcgcaggttgcccata

SEQ ID NO: 40167 - DNA, 41 bp, Emericella nidulans
gttctcgagacgagcgatcgcctcgatgagcggcagcgtga

SEQ ID NO: 40168 - DNA, 49 bp, Emericella nidulans
gaattcactgcggccgccatgcctcagtaacgcctcttgatcttgtaaa

SEQ ID NO: 40169 - DNA, 49 bp, Emericella nidulans
gttctcgagacgagcgatcgccgataataaaaggcaactcacatcaacc

SEQ ID NO: 40170 - DNA, 47 bp, Emericella nidulans
gaattcactgcggccgccatgaacgatgaccaaaacaacgacgatcc

SEQ ID NO: 40171 - DNA, 44 bp, Emericella nidulans
gttctcgagacgagcgatcgccgcgctcggtgtagagttgcttg

SEQ ID NO: 40172 - DNA, 41 bp, Emericella nidulans
gaattcactgcggccgccatgaggcaaaggcaaagacaaaa

SEQ ID NO: 40173 - DNA, 42 bp, Emericella nidulans
gttctcgagacgagcgatcgcccctctacacgcatgagattc

SEQ ID NO: 40174 - DNA, 45 bp, Emericella nidulans
gaattcactgcggccgccatgcaagctcggtttcaacccagagga

SEQ ID NO: 40175 - DNA, 41 bp, Emericella nidulans
gttctcgagacgagcgatcgctgggaccgtcctcgcccata

SEQ ID NO: 40176 - DNA, 46 bp, Emericella nidulans
gaattcactgcggccgccatgcaatccccgactacagccatgaagc

SEQ ID NO: 40177 - DNA, 42 bp, Emericella nidulans
gttctcgagacgagcgatcgcactcgccgagacagccctaaa

SEQ ID NO: 40178 - DNA, 45 bp, Emericella nidulans
gaattcactgcggccgccatgcccaaggcctttacaaagcaagtt

SEQ ID NO: 40179 - DNA, 41 bp, Emericella nidulans
gttctcgagacgagcgatcgccgccggacttcatccgcagt

SEQ ID NO: 40180 - DNA, 48 bp, Emericella nidulans
gaattcactgcggccgccatgtggagcataaatttcctcaaatcaagc

SEQ ID NO: 40181 - DNA, 48 bp, Emericella nidulans
gttctcgagacgagcgatcgcgtgtgccatcatttcttctttcttcag

SEQ ID NO: 40182 - DNA, 41 bp, Emericella nidulans
gaattcactgcggccgccatgcgctgcgaaaggagcccaac

SEQ ID NO: 40183 - DNA, 42 bp, Emericella nidulans
gttctcgagacgagcgatcgcgcatcgtgccgagcagagctt

SEQ ID NO: 40184 - DNA, 41 bp, Emericella nidulans
gaattcactgcggccgccatgctagtgcctcgtgggaacat

SEQ ID NO: 40185 - DNA, 40 bp, Emericella nidulans
gttctcgagacgagcgatcgccgtcaaaccctgaatgtcg

SEQ ID NO: 40186 - DNA, 43 bp, Emericella nidulans
gaattcactgcggccgccatgagctgcgcaacatcatccctga

SEQ ID NO: 40187 - DNA, 41 bp, Emericella nidulans
gttctcgagacgagcgatcgccgccgccctctgaaatcacg

SEQ ID NO: 40188 - DNA, 41 bp, Emericella nidulans
gaattcactgcggccgccatggcgcaggtcgtcgcagctct

SEQ ID NO: 40189 - DNA, 49 bp, Emericella nidulans
gttctcgagacgagcgatcgcctccaatgcagctgtgatcaactttttg

SEQ ID NO: 40190 - DNA, 49 bp, Emericella nidulans
gaattcactgcggccgccatgcatcacagacctgaaaaacaaccgcctc

SEQ ID NO: 40191 - DNA, 47 bp, Emericella nidulans
gttctcgagacgagcgatcgcgcttgaggcggagtttgagcagacga

SEQ ID NO: 40192 - DNA, 41 bp, Emericella nidulans
gaattcactgcggccgccatgccgggacgactcgccactca

SEQ ID NO: 40193 - DNA, 49 bp, Emericella nidulans
gttctcgagacgagcgatcgccatctgcttgtagacgatgccttaaccc

SEQ ID NO: 40194 - DNA, 49 bp, Emericella nidulans
gaattcactgcggccgccatggcccgcttcgagactggaagtagggaaa

SEQ ID NO: 40195 - DNA, 49 bp, Emericella nidulans
gttctcgagacgagcgatcgccagatagccctcctgtttaggaattagc

SEQ ID NO: 40196 - DNA, 49 bp, Emericella nidulans
gaattcactgcggccgccatgagagtcgcacgagatatatttgggaggg

SEQ ID NO: 40197 - DNA, 43 bp, Emericella nidulans
gttctcgagacgagcgatcgccaaatcccgtcccgtaactggt

SEQ ID NO: 40198 - DNA, 49 bp, Emericella nidulans
gaattcactgcggccgccatgggagaagttcaagattgatatccgcacc

SEQ ID NO: 40199 - DNA, 47 bp, Emericella nidulans
gttctcgagacgagcgatcgcgggaacttacatcaccgtccttcttc

SEQ ID NO: 40200 - DNA, 41 bp, Emericella nidulans
gaattcactgcggccgccatgggccatcgcgaggcaaagaa

SEQ ID NO: 40201 - DNA, 45 bp, Emericella nidulans
gttctcgagacgagcgatcgcttcccagccggtggtctttaagtg

SEQ ID NO: 40202 - DNA, 41 bp, Emericella nidulans
gaattcactgcggccgccatggcccacagatgtccccctga

SEQ ID NO: 40203 - DNA, 41 bp, Emericella nidulans
gttctcgagacgagcgatcgccgctccagagcctccccctc

SEQ ID NO: 40204 - DNA, 41 bp, Emericella nidulans
gaattcactgcggccgccatgcgcatccccaacagcaggtc

SEQ ID NO: 40205 - DNA, 43 bp, Emericella nidulans
gttctcgagacgagcgatcgccacacgccacggaagagactcg

SEQ ID NO: 40206 - DNA, 42 bp, Emericella nidulans
gaattcactgcggccgccatggctgggggtttgcagagcaca

SEQ ID NO: 40207 - DNA, 41 bp, Emericella nidulans
gttctcgagacgagcgatcgcttgctggagcgccggtaagg

SEQ ID NO: 40208 - DNA, 41 bp, Emericella nidulans
gaattcactgcggccgccatgctccaaagccagactggaag

SEQ ID NO: 40209 - DNA, 44 bp, Emericella nidulans
gttctcgagacgagcgatcgcatatctcccactctgatactcca

SEQ ID NO: 40210 - DNA, 41 bp, Emericella nidulans
gaattcactgcggccgccatggccgcctccggtcaacaaga

SEQ ID NO: 40211 - DNA, 49 bp, Emericella nidulans
gttctcgagacgagcgatcgcctgttcacacaatgtctctcatccgttg

SEQ ID NO: 40212 - DNA, 41 bp, Emericella nidulans
gaattcactgcggccgccatgacgcgatcttggactaccac

SEQ ID NO: 40213 - DNA, 45 bp, Emericella nidulans
gttctcgagacgagcgatcgccgtagattgtatacgagtcgatga

SEQ ID NO: 40214 - DNA, 40 bp, Emericella nidulans
gaattcactgcggccgccatggttgctgcgtgctcaagac

SEQ ID NO: 40215 - DNA, 45 bp, Emericella nidulans
gttctcgagacgagcgatcgccatatataacccctaatgggaaca

SEQ ID NO: 40216 - DNA, 44 bp, Emericella nidulans
gaattcactgcggccgccatgaatgttgctgaaggggtggagga

SEQ ID NO: 40217 - DNA, 43 bp, Emericella nidulans
gttctcgagacgagcgatcgcgtccaaatacctggcggcagca

SEQ ID NO: 40218 - DNA, 46 bp, Emericella nidulans
gaattcactgcggccgccatgcgggggatgacaaagaagctatcca

SEQ ID NO: 40219 - DNA, 49 bp, Emericella nidulans
gttctcgagacgagcgatcgctggcctagttcaaatagtgtttctgtga

SEQ ID NO: 40220 - DNA, 41 bp, Emericella nidulans
gaattcactgcggccgccatgcgccgagactgcgacgagaa

SEQ ID NO: 40221 - DNA, 41 bp, Emericella nidulans
gttctcgagacgagcgatcgccgccggcaaccacaacaatg

SEQ ID NO: 40222 - DNA, 46 bp, Emericella nidulans
gaattcactgcggccgccatggaggtctggcgatactggctctact

SEQ ID NO: 40223 - DNA, 45 bp, Emericella nidulans
gttctcgagacgagcgatcgcggctcagttttcctgctcgccttt

SEQ ID NO: 40224 - DNA, 41 bp, Emericella nidulans
gaattcactgcggccgccatgcgtccgagacggtgcgactg

SEQ ID NO: 40225 - DNA, 41 bp, Emericella nidulans
gttctcgagacgagcgatcgcgcccgcgtccagcttgatct

SEQ ID NO: 40226 - DNA, 48 bp, Emericella nidulans
gaattcactgcggccgccatgatcctagttcacatctgacggcgagac

SEQ ID NO: 40227 - DNA, 43 bp, Emericella nidulans
gttctcgagacgagcgatcgcttatgggtaccgcggggtagag

SEQ ID NO: 40228 - DNA, 43 bp, Emericella nidulans
gaattcactgcggccgccatgtaagctacacaatgaagtttcg

SEQ ID NO: 40229 - DNA, 41 bp, Emericella nidulans
gttctcgagacgagcgatcgctgttcagatccgctgtttcc

SEQ ID NO: 40230 - DNA, 44 bp, Emericella nidulans
gaattcactgcggccgccatggatcttttatctcggctacagca

SEQ ID NO: 40231 - DNA, 42 bp, Emericella nidulans
gttctcgagacgagcgatcgctgctcgacttttctgttgagg

SEQ ID NO: 40232 - DNA, 49 bp, Emericella nidulans
gaattcactgcggccgccatggcagatttactgtatcgctagtagactc

SEQ ID NO: 40233 - DNA, 40 bp, Emericella nidulans
gttctcgagacgagcgatcgcggtgaccatctcccccata

SEQ ID NO: 40234 - DNA, 45 bp, Emericella nidulans
gaattcactgcggccgccatggcatcctcctccaagacgaaggct

SEQ ID NO: 40235 - DNA, 44 bp, Emericella nidulans
gttctcgagacgagcgatcgcccggccgtacttctgaaactccc

SEQ ID NO: 40236 - DNA, 40 bp, Emericella nidulans
gaattcactgcggccgccatgggactatgccaaagactgg

SEQ ID NO: 40237 - DNA, 41 bp, Emericella nidulans
gttctcgagacgagcgatcgcatctgctccaaccacattcc

SEQ ID NO: 40238 - DNA, 41 bp, Emericella nidulans
gaattcactgcggccgccatggacatgccatgtggtttttg

SEQ ID NO: 40239 - DNA, 40 bp, Emericella nidulans
gttctcgagacgagcgatcgcggctttctagctggctggt

SEQ ID NO: 40240 - DNA, 47 bp, Emericella nidulans
gaattcactgcggccgccatggcgccctgctcacatatgatgctgtc

SEQ ID NO: 40241 - DNA, 49 bp, Emericella nidulans
gttctcgagacgagcgatcgctgaaggctcagtatctgcttgaacactg

SEQ ID NO: 40242 - DNA, 41 bp, Emericella nidulans
gaattcactgcggccgccatgccttgatgctttgaccgatt

SEQ ID NO: 40243 - DNA, 41 bp, Emericella nidulans
gttctcgagacgagcgatcgccgccatttcatagctatccc

SEQ ID NO: 40244 - DNA, 41 bp, Emericella nidulans
gaattcactgcggccgccatgccaacatgtgtgcgcggtag

SEQ ID NO: 40245 - DNA, 48 bp, Emericella nidulans
gttctcgagacgagcgatcgccgataagcgtagtgaaggcgttttaca

SEQ ID NO: 40246 - DNA, 41 bp, Emericella nidulans
gaattcactgcggccgccatggcgcgatgtccgcaaccata

SEQ ID NO: 40247 - DNA, 44 bp, Emericella nidulans
gttctcgagacgagcgatcgcccgcacagagatatcgaccgagt

SEQ ID NO: 40248 - DNA, 43 bp, Emericella nidulans
gaattcactgcggccgccatgccgccagccaattgttggagtt

SEQ ID NO: 40249 - DNA, 47 bp, Emericella nidulans
gttctcgagacgagcgatcgctctagaaacccccaagtgtttctccc

SEQ ID NO: 40250 - DNA, 41 bp, Emericella nidulans
gaattcactgcggccgccatgtcccaccgctgccggttact

SEQ ID NO: 40251 - DNA, 49 bp, Emericella nidulans
gttctcgagacgagcgatcgcctatttggagggagcaatctcaacacca

SEQ ID NO: 40252 - DNA, 41 bp, Emericella nidulans
gaattcactgcggccgccatgtgcagggtgaacgtattgaa

SEQ ID NO: 40253 - DNA, 41 bp, Emericella nidulans
gttctcgagacgagcgatcgcagactcgttgcttcagctcc

SEQ ID NO: 40254 - DNA, 44 bp, Emericella nidulans
gaattcactgcggccgccatgcggaagaagagatcaattctgag

SEQ ID NO: 40255 - DNA, 39 bp, Emericella nidulans
gttctcgagacgagcgatcgcccttcatctcgccaatgc

SEQ ID NO: 40256 - DNA, 42 bp, Emericella nidulans
gaattcactgcggccgccatggccgaggagaccgcgaatctg

SEQ ID NO: 40257 - DNA, 41 bp, Emericella nidulans
gttctcgagacgagcgatcgcggggttgtccgaacggaggg

SEQ ID NO: 40258 - DNA, 41 bp, Emericella nidulans
gaattcactgcggccgccatgtcgttgtgatgatgcaggtc

SEQ ID NO: 40259 - DNA, 41 bp, Emericella nidulans
gttctcgagacgagcgatcgcaccacccctccagttcttct

SEQ ID NO: 40260 - DNA, 48 bp, Emericella nidulans
gaattcactgcggccgccatgcagaagcaatgttgggatttgatctga

SEQ ID NO: 40261 - DNA, 49 bp, Emericella nidulans
gttctcgagacgagcgatcgcggctgatatctggcctagtttttgtagc

SEQ ID NO: 40262 - DNA, 41 bp, Emericella nidulans
gaattcactgcggccgccatgctttgcggaccgctcgagaa

SEQ ID NO: 40263 - DNA, 42 bp, Emericella nidulans
gttctcgagacgagcgatcgcgctttttagccgctgggacaa

SEQ ID NO: 40264 - DNA, 41 bp, Emericella nidulans
gaattcactgcggccgccatgatgccgcccagtacgccatc

SEQ ID NO: 40265 - DNA, 41 bp, Emericella nidulans
gttctcgagacgagcgatcgcccacggaaccggcagcaata

SEQ ID NO: 40266 - DNA, 46 bp, Emericella nidulans
gaattcactgcggccgccatgtctttatccttctgttatctcactc

SEQ ID NO: 40267 - DNA, 40 bp, Emericella nidulans
gttctcgagacgagcgatcgcgagagtcttgacgcgctcc

SEQ ID NO: 40268 - DNA, 46 bp, Emericella nidulans
gaattcactgcggccgccatgtaactgaagacatttattgcctgct

SEQ ID NO: 40269 - DNA, 41 bp, Emericella nidulans
gttctcgagacgagcgatcgcctctcaccactcgactgcaa

SEQ ID NO: 40270 - DNA, 49 bp, Emericella nidulans
gaattcactgcggccgccatgatgatacgatcgtggatttggttcagga

SEQ ID NO: 40271 - DNA, 42 bp, Emericella nidulans
gttctcgagacgagcgatcgcgctcatgccaaggaccggtgt

SEQ ID NO: 40272 - DNA, 48 bp, Emericella nidulans
gaattcactgcggccgccatggatattcgaaatgttcgttgcccctcc

SEQ ID NO: 40273 - DNA, 49 bp, Emericella nidulans
gttctcgagacgagcgatcgcttcaggtgcaaagtagagatcttcatca

SEQ ID NO: 40274 - DNA, 41 bp, Emericella nidulans
gaattcactgcggccgccatgggcaagaaggagcttgtgac

SEQ ID NO: 40275 - DNA, 41 bp, Emericella nidulans
gttctcgagacgagcgatcgcgtgctcctcgtcaccgtatt

SEQ ID NO: 40276 - DNA, 42 bp, Emericella nidulans
gaattcactgcggccgccatgcctaccatcatcccgggcacc

SEQ ID NO: 40277 - DNA, 44 bp, Emericella nidulans
gttctcgagacgagcgatcgctcttccggcagagttccaggttc

SEQ ID NO: 40278 - DNA, 46 bp, Emericella nidulans
gaattcactgcggccgccatggtgagaagaatgtgaaccgaccaga

SEQ ID NO: 40279 - DNA, 47 bp, Emericella nidulans
gttctcgagacgagcgatcgccatgtcaatcatgtcattgaacctca

SEQ ID NO: 40280 - DNA, 48 bp, Emericella nidulans
gaattcactgcggccgccatggaaaaagcagagagttccgatatcacg

SEQ ID NO: 40281 - DNA, 41 bp, Emericella nidulans
gttctcgagacgagcgatcgcctccccgcggaatcgactgt

SEQ ID NO: 40282 - DNA, 42 bp, Emericella nidulans
gaattcactgcggccgccatggcatctcggccattttcgtca

SEQ ID NO: 40283 - DNA, 49 bp, Emericella nidulans
gttctcgagacgagcgatcgccaagaagtcacgagcaagaagttcaacc

SEQ ID NO: 40284 - DNA, 40 bp, Emericella nidulans
gaattcactgcggccgccatggccctttcaggaccagcta

SEQ ID NO: 40285 - DNA, 40 bp, Emericella nidulans
gttctcgagacgagcgatcgcgcaggaatgccctgattct

SEQ ID NO: 40286 - DNA, 49 bp, Emericella nidulans
gaattcactgcggccgccatgcacgtccttcctagaggtctgccctgtc

SEQ ID NO: 40287 - DNA, 46 bp, Emericella nidulans
gttctcgagacgagcgatcgcctttccgctcattttcgtattcctc

SEQ ID NO: 40288 - DNA, 49 bp, Emericella nidulans
gaattcactgcggccgccatgtactggctgtactacctcaaccctttca

SEQ ID NO: 40289 - DNA, 46 bp, Emericella nidulans
gttctcgagacgagcgatcgcctactctgccttcttcgacgccttg

SEQ ID NO: 40290 - DNA, 41 bp, Emericella nidulans
gaattcactgcggccgccatgcgactctgcagacgacacat

SEQ ID NO: 40291 - DNA, 43 bp, Emericella nidulans
gttctcgagacgagcgatcgccgataatcagcaaagtgtttgt

SEQ ID NO: 40292 - DNA, 46 bp, Emericella nidulans
gaattcactgcggccgccatgttcacttcctgcgcttctgaattgg

SEQ ID NO: 40293 - DNA, 48 bp, Emericella nidulans
gttctcgagacgagcgatcgcatatctccacaggagaaagagccgagt

SEQ ID NO: 40294 - DNA, 41 bp, Emericella nidulans
gaattcactgcggccgccatgccatccggctggctgctgac

SEQ ID NO: 40295 - DNA, 49 bp, Emericella nidulans
gttctcgagacgagcgatcgcaagtgagtccacatcctccttccattca

SEQ ID NO: 40296 - DNA, 41 bp, Emericella nidulans
gaattcactgcggccgccatgggccctgtttggttcgggtg

SEQ ID NO: 40297 - DNA, 46 bp, Emericella nidulans
gttctcgagacgagcgatcgcgatacagcgagtcattccttgcaca

SEQ ID NO: 40298 - DNA, 41 bp, Emericella nidulans
gaattcactgcggccgccatgtactgaaacgcatgctcgac

SEQ ID NO: 40299 - DNA, 44 bp, Emericella nidulans
gttctcgagacgagcgatcgcggaagaaagacttacccggtatc

SEQ ID NO: 40300 - DNA, 46 bp, Emericella nidulans
gaattcactgcggccgccatgttaggacaatattgatgtcctagcc

SEQ ID NO: 40301 - DNA, 45 bp, Emericella nidulans
gttctcgagacgagcgatcgcggaacatcatgagtctaatcaagc

SEQ ID NO: 40302 - DNA, 45 bp, Emericella nidulans
gaattcactgcggccgccatgtgagtatgtggctgtccatgaggc

SEQ ID NO: 40303 - DNA, 49 bp, Emericella nidulans
gttctcgagacgagcgatcgctttttctttccaccttcctcgtcggatt

SEQ ID NO: 40304 - DNA, 49 bp, Emericella nidulans
gaattcactgcggccgccatgctcgaaattcggtattcagatacgatca

SEQ ID NO: 40305 - DNA, 45 bp, Emericella nidulans
gttctcgagacgagcgatcgcccagacgtttgctgcaaatcaagg

SEQ ID NO: 40306 - DNA, 44 bp, Emericella nidulans
gaattcactgcggccgccatgagaaggcgatgaagaaccgaagc

SEQ ID NO: 40307 - DNA, 49 bp, Emericella nidulans
gttctcgagacgagcgatcgcgtcagatgcgtatttgaagtcaggggtg

SEQ ID NO: 40308 - DNA, 43 bp, Emericella nidulans
gaattcactgcggccgccatggctcggtatattctgggtaggc

SEQ ID NO: 40309 - DNA, 41 bp, Emericella nidulans
gttctcgagacgagcgatcgcgacaacaccccaggcattac

SEQ ID NO: 40310 - DNA, 41 bp, Emericella nidulans
gaattcactgcggccgccatgcaagaagggcagcgcgcatt

SEQ ID NO: 40311 - DNA, 45 bp, Emericella nidulans
gttctcgagacgagcgatcgcaaacaggaacaaagtcggggtggg

SEQ ID NO: 40312 - DNA, 41 bp, Emericella nidulans
gaattcactgcggccgccatggtcaaggccgctgtgcgtga

SEQ ID NO: 40313 - DNA, 49 bp, Emericella nidulans
gttctcgagacgagcgatcgcagtattggttcatggcaaaagaaagctg

SEQ ID NO: 40314 - DNA, 41 bp, Emericella nidulans
gaattcactgcggccgccatgggccggctcgttgggatctt

SEQ ID NO: 40315 - DNA, 41 bp, Emericella nidulans
gttctcgagacgagcgatcgccggcagggtctcgctcgaag

SEQ ID NO: 40316 - DNA, 49 bp, Emericella nidulans
gaattcactgcggccgccatgaacagcaagagatggctaagtgagtgtt

SEQ ID NO: 40317 - DNA, 49 bp, Emericella nidulans
gttctcgagacgagcgatcgcaatctgctttttctgtctcgtaggcttt

SEQ ID NO: 40318 - DNA, 41 bp, Emericella nidulans
gaattcactgcggccgccatggcctcccagcaacgctcgaa

SEQ ID NO: 40319 - DNA, 46 bp, Emericella nidulans
gttctcgagacgagcgatcgcaagcatgctatccaccagatctccc

SEQ ID NO: 40320 - DNA, 47 bp, Emericella nidulans
gaattcactgcggccgccatggtctattcctcattccttgcctcctt

SEQ ID NO: 40321 - DNA, 44 bp, Emericella nidulans
gttctcgagacgagcgatcgcattcatagtgatgcggcccctta

SEQ ID NO: 40322 - DNA, 49 bp, Emericella nidulans
gaattcactgcggccgccatgttggcttcatcagcaataaacagccagt

SEQ ID NO: 40323 - DNA, 46 bp, Emericella nidulans
gttctcgagacgagcgatcgcagataaccggaacggtctcgaccta

SEQ ID NO: 40324 - DNA, 49 bp, Emericella nidulans
gaattcactgcggccgccatgagaggatcccctacttgataactgcctc

SEQ ID NO: 40325 - DNA, 47 bp, Emericella nidulans
gttctcgagacgagcgatcgccaaccttagcatcgtgaaccgccttc

SEQ ID NO: 40326 - DNA, 49 bp, Emericella nidulans
gaattcactgcggccgccatgaatacttctctagaaagcagcagcagca

SEQ ID NO: 40327 - DNA, 41 bp, Emericella nidulans
gttctcgagacgagcgatcgccgcgtaggccttccacagca

SEQ ID NO: 40328 - DNA, 41 bp, Emericella nidulans
gaattcactgcggccgccatgtggtacgctgcattatggaa

SEQ ID NO: 40329 - DNA, 41 bp, Emericella nidulans
gttctcgagacgagcgatcgccctgcttcaatcgttcacaa

SEQ ID NO: 40330 - DNA, 41 bp, Emericella nidulans
gaattcactgcggccgccatgtgcagtgaactgaccggcta

SEQ ID NO: 40331 - DNA, 41 bp, Emericella nidulans
gttctcgagacgagcgatcgcttataccgcacccgataacc

SEQ ID NO: 40332 - DNA, 49 bp, Emericella nidulans
gaattcactgcggccgccatgacgattctcgcgtggaattcatcgctct

SEQ ID NO: 40333 - DNA, 47 bp, Emericella nidulans
gttctcgagacgagcgatcgccatcaccatttgtgacgttgaaggct

SEQ ID NO: 40334 - DNA, 41 bp, Emericella nidulans
gaattcactgcggccgccatgaagccgcaagatcctaatca

SEQ ID NO: 40335 - DNA, 39 bp, Emericella nidulans
gttctcgagacgagcgatcgccagctgcggcacaatctg

SEQ ID NO: 40336 - DNA, 45 bp, Emericella nidulans
gaattcactgcggccgccatgggccctacaaacctctgacgaacc

SEQ ID NO: 40337 - DNA, 42 bp, Emericella nidulans
gttctcgagacgagcgatcgctccccaccccaataacgatcc

SEQ ID NO: 40338 - DNA, 44 bp, Emericella nidulans
gaattcactgcggccgccatgggagatgtggaaaatatctttgg

SEQ ID NO: 40339 - DNA, 42 bp, Emericella nidulans
gttctcgagacgagcgatcgccgagaccgtatagcagtttgc

SEQ ID NO: 40340 - DNA, 41 bp, Emericella nidulans
gaattcactgcggccgccatgcaaagctattctggccaagc

SEQ ID NO: 40341 - DNA, 39 bp, Emericella nidulans
gttctcgagacgagcgatcgcatcccggaagatgccaac

SEQ ID NO: 40342 - DNA, 41 bp, Emericella nidulans
gaattcactgcggccgccatgtgtccagcctgccccttcgt

SEQ ID NO: 40343 - DNA, 42 bp, Emericella nidulans
gttctcgagacgagcgatcgcaaggctcaggaggggatccat

SEQ ID NO: 40344 - DNA, 41 bp, Emericella nidulans
gaattcactgcggccgccatgcccgactccagccccagact

SEQ ID NO: 40345 - DNA, 41 bp, Emericella nidulans
gttctcgagacgagcgatcgccgcttgcgctgcttcttgtt

SEQ ID NO: 40346 - DNA, 47 bp, Emericella nidulans
gaattcactgcggccgccatgcatctcctccttgcgtctcttgatgg

SEQ ID NO: 40347 - DNA, 48 bp, Emericella nidulans
gttctcgagacgagcgatcgccttttcaagagctttgcggcaggcttc

SEQ ID NO: 40348 - DNA, 41 bp, Emericella nidulans
gaattcactgcggccgccatgtacacatggccggcggttgg

SEQ ID NO: 40349 - DNA, 41 bp, Emericella nidulans
gttctcgagacgagcgatcgcgccgacgcctgggagatcaa

SEQ ID NO: 40350 - DNA, 41 bp, Emericella nidulans
gaattcactgcggccgccatgccagacactcgctatcgtca

SEQ ID NO: 40351 - DNA, 40 bp, Emericella nidulans
gttctcgagacgagcgatcgccggagttcaggttgcagaa

SEQ ID NO: 40352 - DNA, 41 bp, Emericella nidulans
gaattcactgcggccgccatgctgctgaccatattgttgct

SEQ ID NO: 40353 - DNA, 43 bp, Emericella nidulans
gttctcgagacgagcgatcgcagaacggtaaaggtaaccactt

SEQ ID NO: 40354 - DNA, 42 bp, Emericella nidulans
gaattcactgcggccgccatgcaaagccctgaacgcgagcaa

SEQ ID NO: 40355 - DNA, 44 bp, Emericella nidulans
gttctcgagacgagcgatcgcatgagcgatggcatcaagaaaga

SEQ ID NO: 40356 - DNA, 45 bp, Emericella nidulans
gaattcactgcggccgccatggagccgggtgaagtcacataagaa

SEQ ID NO: 40357 - DNA, 49 bp, Emericella nidulans
gttctcgagacgagcgatcgcctgaagaggaaactattcaccccctttc

SEQ ID NO: 40358 - DNA, 48 bp, Emericella nidulans
gaattcactgcggccgccatgaacacgaagagatgcaaggtttattca

SEQ ID NO: 40359 - DNA, 49 bp, Emericella nidulans
gttctcgagacgagcgatcgcctaaatagttccagtccgaaatcctcgt

SEQ ID NO: 40360 - DNA, 43 bp, Emericella nidulans
gaattcactgcggccgccatgcctccgtttcggtggaagaggg

SEQ ID NO: 40361 - DNA, 41 bp, Emericella nidulans
gttctcgagacgagcgatcgccgcccatcgggaccttgaaa

SEQ ID NO: 40362 - DNA, 48 bp, Emericella nidulans
gaattcactgcggccgccatgtatctctgagaccgcttccatctttgc

SEQ ID NO: 40363 - DNA, 47 bp, Emericella nidulans
gttctcgagacgagcgatcgctagacacgcttgaagggaggaacagg

SEQ ID NO: 40364 - DNA, 43 bp, Emericella nidulans
gaattcactgcggccgccatgccttggatcaaattggttattg

SEQ ID NO: 40365 - DNA, 42 bp, Emericella nidulans
gttctcgagacgagcgatcgcgggaccagaaataccttgctt

SEQ ID NO: 40366 - DNA, 48 bp, Emericella nidulans
gaattcactgcggccgccatgatgtctggacttaaggccggtgacagc

SEQ ID NO: 40367 - DNA, 49 bp, Emericella nidulans
gttctcgagacgagcgatcgcagaactcaaggtggttcttggcgggctc

SEQ ID NO: 40368 - DNA, 45 bp, Emericella nidulans
gaattcactgcggccgccatgatggaatcgagtatggatattaag

SEQ ID NO: 40369 - DNA, 42 bp, Emericella nidulans
gttctcgagacgagcgatcgcatccagagtgacctttggagg

SEQ ID NO: 40370 - DNA, 46 bp, Emericella nidulans
gaattcactgcggccgccatgtgcgaactgtgttccatgctaattt

SEQ ID NO: 40371 - DNA, 41 bp, Emericella nidulans
gttctcgagacgagcgatcgctggcaatcccggcaacatcc

SEQ ID NO: 40372 - DNA, 41 bp, Emericella nidulans
gaattcactgcggccgccatgctggtgctcgaatccctaaa

SEQ ID NO: 40373 - DNA, 41 bp, Emericella nidulans
gttctcgagacgagcgatcgcccttttccttaagacggaga

SEQ ID NO: 40374 - DNA, 46 bp, Emericella nidulans
gaattcactgcggccgccatgactgcgatcttgatcactgtgcctc

SEQ ID NO: 40375 - DNA, 49 bp, Emericella nidulans
gttctcgagacgagcgatcgctttcttttccaacaaatggacacgggta

SEQ ID NO: 40376 - DNA, 48 bp, Emericella nidulans
gaattcactgcggccgccatggagtactgcttagctggaacggagcaa

SEQ ID NO: 40377 - DNA, 49 bp, Emericella nidulans
gttctcgagacgagcgatcgcgctactattgacttccagcacgattctt

SEQ ID NO: 40378 - DNA, 39 bp, Emericella nidulans
gaattcactgcggccgccatgttgtcggggataatttgg

SEQ ID NO: 40379 - DNA, 41 bp, Emericella nidulans
gttctcgagacgagcgatcgcctgcttctcttgacgagcct

SEQ ID NO: 40380 - DNA, 41 bp, Emericella nidulans
gaattcactgcggccgccatgattgctgctctccgttcagt

SEQ ID NO: 40381 - DNA, 40 bp, Emericella nidulans
gttctcgagacgagcgatcgcaccctggtcaatccattcc

SEQ ID NO: 40382 - DNA, 41 bp, Emericella nidulans
gaattcactgcggccgccatgttcacgcagctttccctaat

SEQ ID NO: 40383 - DNA, 42 bp, Emericella nidulans
gttctcgagacgagcgatcgccgactgaattcattcgtttgg

SEQ ID NO: 40384 - DNA, 41 bp, Emericella nidulans
gaattcactgcggccgccatgggcaaccagagcgagcagca

SEQ ID NO: 40385 - DNA, 43 bp, Emericella nidulans
gttctcgagacgagcgatcgctggctggggcacgtaaggtaca

SEQ ID NO: 40386 - DNA, 43 bp, Emericella nidulans
gaattcactgcggccgccatgggcgtgaaagctgacgttgggt

SEQ ID NO: 40387 - DNA, 49 bp, Emericella nidulans
gttctcgagacgagcgatcgccaaacatgaattcaagaatatgcgactg

SEQ ID NO: 40388 - DNA, 41 bp, Emericella nidulans
gaattcactgcggccgccatgtcaaggctgccggcatcaag

SEQ ID NO: 40389 - DNA, 41 bp, Emericella nidulans
gttctcgagacgagcgatcgcgagggtagggtgggcgtggc

SEQ ID NO: 40390 - DNA, 41 bp, Emericella nidulans
gaattcactgcggccgccatgtggaagaggcacggattaac

SEQ ID NO: 40391 - DNA, 41 bp, Emericella nidulans
gttctcgagacgagcgatcgcgccccctatacgcttgacta

SEQ ID NO: 40392 - DNA, 48 bp, Emericella nidulans
gaattcactgcggccgccatgacgcctacctatccaaaactggtctca

SEQ ID NO: 40393 - DNA, 40 bp, Emericella nidulans
gttctcgagacgagcgatcgccgcggccttctgatgcaag

SEQ ID NO: 40394 - DNA, 41 bp, Emericella nidulans
gaattcactgcggccgccatgcgtgtaaagcctcatgctca

SEQ ID NO: 40395 - DNA, 41 bp, Emericella nidulans
gttctcgagacgagcgatcgcatggaaatcgctcaacatcc

SEQ ID NO: 40396 - DNA, 49 bp, Emericella nidulans
gaattcactgcggccgccatgagagatcttaaatggggtgttcccgttc

SEQ ID NO: 40397 - DNA, 46 bp, Emericella nidulans
gttctcgagacgagcgatcgctctccactcgaactggtgtctcctg

SEQ ID NO: 40398 - DNA, 46 bp, Emericella nidulans
gaattcactgcggccgccatgcgctcaaaaggcagatacgttggtg

SEQ ID NO: 40399 - DNA, 48 bp, Emericella nidulans
gttctcgagacgagcgatcgcttcactgattcacattgcggtataagc

SEQ ID NO: 40400 - DNA, 47 bp, Emericella nidulans
gaattcactgcggccgccatggtttactccagcgctctcgcagccac

SEQ ID NO: 40401 - DNA, 48 bp, Emericella nidulans
gttctcgagacgagcgatcgccacccagaagacgaaccttgccgatct

SEQ ID NO: 40402 - DNA, 41 bp, Emericella nidulans
gaattcactgcggccgccatgatcgctgccctgcgctccat

SEQ ID NO: 40403 - DNA, 41 bp, Emericella nidulans
gttctcgagacgagcgatcgcccagttggcttgcgctgtgc

SEQ ID NO: 40404 - DNA, 43 bp, Emericella nidulans
gaattcactgcggccgccatgctcagcttctcgtctggcatcc

SEQ ID NO: 40405 - DNA, 41 bp, Emericella nidulans
gttctcgagacgagcgatcgccgacgccgtctgcactgtcc

SEQ ID NO: 40406 - DNA, 47 bp, Emericella nidulans
gaattcactgcggccgccatgcgattattggagagttgctcggtcgt

SEQ ID NO: 40407 - DNA, 49 bp, Emericella nidulans
gttctcgagacgagcgatcgcgtagaaagtctcgtcaacagtgcgaccc

SEQ ID NO: 40408 - DNA, 45 bp, Emericella nidulans
gaattcactgcggccgccatgcgtcgtccatctatcgagccatca

SEQ ID NO: 40409 - DNA, 45 bp, Emericella nidulans
gttctcgagacgagcgatcgctctccagactctgctgctagtcca

SEQ ID NO: 40410 - DNA, 41 bp, Emericella nidulans
gaattcactgcggccgccatgccttttcttcgacccctctg

SEQ ID NO: 40411 - DNA, 42 bp, Emericella nidulans
gttctcgagacgagcgatcgcaatatcggagacagtcgtgaa

SEQ ID NO: 40412 - DNA, 44 bp, Emericella nidulans
gaattcactgcggccgccatgggctggaacgaactcatggaaga

SEQ ID NO: 40413 - DNA, 46 bp, Emericella nidulans
gttctcgagacgagcgatcgcttgaagaagccgattactgtgttgc

SEQ ID NO: 40414 - DNA, 41 bp, Emericella nidulans
gaattcactgcggccgccatgaccttgctacacttgggtgg

SEQ ID NO: 40415 - DNA, 41 bp, Emericella nidulans
gttctcgagacgagcgatcgcacctccttcttcaacccctc

SEQ ID NO: 40416 - DNA, 41 bp, Emericella nidulans
gaattcactgcggccgccatggcagagcctgacgacttacc

SEQ ID NO: 40417 - DNA, 45 bp, Emericella nidulans
gttctcgagacgagcgatcgcttagaagcctagtattttctccag

SEQ ID NO: 40418 - DNA, 46 bp, Emericella nidulans
gaattcactgcggccgccatgttttggcgtttatgagttcacgaag

SEQ ID NO: 40419 - DNA, 45 bp, Emericella nidulans
gttctcgagacgagcgatcgccttcgccgaaagcttcgaactgct

SEQ ID NO: 40420 - DNA, 43 bp, Emericella nidulans
gaattcactgcggccgccatgggtcattcccaagaataacacc

SEQ ID NO: 40421 - DNA, 41 bp, Emericella nidulans
gttctcgagacgagcgatcgcggctaccataaggcttgctg

SEQ ID NO: 40422 - DNA, 43 bp, Emericella nidulans
gaattcactgcggccgccatgcgggcaaagcattgtcgacctc

SEQ ID NO: 40423 - DNA, 49 bp, Emericella nidulans
gttctcgagacgagcgatcgctggttctgtttaggaacaggtctaaccc

SEQ ID NO: 40424 - DNA, 42 bp, Emericella nidulans
gaattcactgcggccgccatgcgggggtcttcttcgccagtc

SEQ ID NO: 40425 - DNA, 41 bp, Emericella nidulans
gttctcgagacgagcgatcgcccatcgcaacccccatccac

SEQ ID NO: 40426 - DNA, 45 bp, Emericella nidulans
gaattcactgcggccgccatgggtgaaatcgttgcagtgacagga

SEQ ID NO: 40427 - DNA, 41 bp, Emericella nidulans
gttctcgagacgagcgatcgcgcagcgaaatggcagccaca

SEQ ID NO: 40428 - DNA, 44 bp, Emericella nidulans
gaattcactgcggccgccatggaatcagttcgtcaagtttgtca

SEQ ID NO: 40429 - DNA, 41 bp, Emericella nidulans
gttctcgagacgagcgatcgctgaactcaaccagaggaccc

SEQ ID NO: 40430 - DNA, 41 bp, Emericella nidulans
gaattcactgcggccgccatgatggaggtcagtcgctgatt

SEQ ID NO: 40431 - DNA, 42 bp, Emericella nidulans
gttctcgagacgagcgatcgcgggccgattaatcatgttttc

SEQ ID NO: 40432 - DNA, 48 bp, Emericella nidulans
gaattcactgcggccgccatgcgacagaaaagcaggatagatcacaaa

SEQ ID NO: 40433 - DNA, 41 bp, Emericella nidulans
gttctcgagacgagcgatcgcccgtgcaaagcgcgactcag

SEQ ID NO: 40434 - DNA, 43 bp, Emericella nidulans
gaattcactgcggccgccatgggcaagcaccagcacgtatccc

SEQ ID NO: 40435 - DNA, 42 bp, Emericella nidulans
gttctcgagacgagcgatcgcggacttgcaggctccgatcca

SEQ ID NO: 40436 - DNA, 48 bp, Emericella nidulans
gaattcactgcggccgccatgccgacctattactacgcacctccacga

SEQ ID NO: 40437 - DNA, 41 bp, Emericella nidulans
gttctcgagacgagcgatcgcacatgcgcgggatgttgtgc

SEQ ID NO: 40438 - DNA, 41 bp, Emericella nidulans
gaattcactgcggccgccatgggtcgtggtttccgatgata

SEQ ID NO: 40439 - DNA, 41 bp, Emericella nidulans
gttctcgagacgagcgatcgcgtactcgctagcccttttgg

SEQ ID NO: 40440 - DNA, 41 bp, Emericella nidulans
gaattcactgcggccgccatgcggcggtcatgacgagcaac

SEQ ID NO: 40441 - DNA, 47 bp, Emericella nidulans
gttctcgagacgagcgatcgccattttcttcaccctccttggcagca

SEQ ID NO: 40442 - DNA, 47 bp, Emericella nidulans
gaattcactgcggccgccatggttgaagaccgattttctcgccaaca

SEQ ID NO: 40443 - DNA, 43 bp, Emericella nidulans
gttctcgagacgagcgatcgccgtgttttcgaggcgctatgga

SEQ ID NO: 40444 - DNA, 46 bp, Emericella nidulans
gaattcactgcggccgccatgcagacatgatcacgtcggtctcttt

SEQ ID NO: 40445 - DNA, 41 bp, Emericella nidulans
gttctcgagacgagcgatcgcaggcgatgctttgccgtgcc

SEQ ID NO: 40446 - DNA, 44 bp, Emericella nidulans
gaattcactgcggccgccatgacatcacaatcatggcgataccc

SEQ ID NO: 40447 - DNA, 41 bp, Emericella nidulans
gttctcgagacgagcgatcgcgcccccgcggtaacaaacaa

SEQ ID NO: 40448 - DNA, 41 bp, Emericella nidulans
gaattcactgcggccgccatggccgcgactggagtgggaac

SEQ ID NO: 40449 - DNA, 41 bp, Emericella nidulans
gttctcgagacgagcgatcgccctcccgtgctcgcttctcg

SEQ ID NO: 40450 - DNA, 49 bp, Emericella nidulans
gaattcactgcggccgccatgtatattgacgacgatgatactgcgaacg

SEQ ID NO: 40451 - DNA, 44 bp, Emericella nidulans
gttctcgagacgagcgatcgcttcgcgtaatctcacccgaagtc

SEQ ID NO: 40452 - DNA, 45 bp, Emericella nidulans
gaattcactgcggccgccatggcttcaaacagtgggctggggaaa

SEQ ID NO: 40453 - DNA, 41 bp, Emericella nidulans
gttctcgagacgagcgatcgcgcacttcccggcattgctca

SEQ ID NO: 40454 - DNA, 41 bp, Emericella nidulans
gaattcactgcggccgccatgcgcaaagttagcacgttgaa

SEQ ID NO: 40455 - DNA, 43 bp, Emericella nidulans
gttctcgagacgagcgatcgcaaaatcacaaatgttgctgaga

SEQ ID NO: 40456 - DNA, 41 bp, Emericella nidulans
gaattcactgcggccgccatggcgaggcgttcctccccttc

SEQ ID NO: 40457 - DNA, 48 bp, Emericella nidulans
gttctcgagacgagcgatcgccgatcatcttcctcagtccacatcttg

SEQ ID NO: 40458 - DNA, 48 bp, Emericella nidulans
gaattcactgcggccgccatgtatacaccaaatcgggtccatcgcaga

SEQ ID NO: 40459 - DNA, 44 bp, Emericella nidulans
gttctcgagacgagcgatcgccctatccaagcgtggctctttct

SEQ ID NO: 40460 - DNA, 41 bp, Emericella nidulans
gaattcactgcggccgccatgacgttcaacgaaaccagctt

SEQ ID NO: 40461 - DNA, 41 bp, Emericella nidulans
gttctcgagacgagcgatcgccgcactttgcatggtgtatc

SEQ ID NO: 40462 - DNA, 45 bp, Emericella nidulans
gaattcactgcggccgccatgcatcacctcccttctttcgtcaac

SEQ ID NO: 40463 - DNA, 48 bp, Emericella nidulans
gttctcgagacgagcgatcgcgagagactcgaagtcctcgcctagtga

SEQ ID NO: 40464 - DNA, 41 bp, Emericella nidulans
gaattcactgcggccgccatggcgatggcatggccaatgtg

SEQ ID NO: 40465 - DNA, 41 bp, Emericella nidulans
gttctcgagacgagcgatcgcgcaacgccagtgggcacaag

SEQ ID NO: 40466 - DNA, 41 bp, Emericella nidulans
gaattcactgcggccgccatgaagaggaggcaatgcttgag

SEQ ID NO: 40467 - DNA, 41 bp, Emericella nidulans
gttctcgagacgagcgatcgcaccgtgatgaagaaaccacc

SEQ ID NO: 40468 - DNA, 46 bp, Emericella nidulans
gaattcactgcggccgccatgatgagcgatacacctacgcgcaaga

SEQ ID NO: 40469 - DNA, 41 bp, Emericella nidulans
gttctcgagacgagcgatcgccttggcctggcgccacatct

SEQ ID NO: 40470 - DNA, 41 bp, Emericella nidulans
gaattcactgcggccgccatgcaccgcccactttccccaga

SEQ ID NO: 40471 - DNA, 46 bp, Emericella nidulans
gttctcgagacgagcgatcgcgttcctcaagggcgggtatctgtgt

SEQ ID NO: 40472 - DNA, 46 bp, Emericella nidulans
gaattcactgcggccgccatgctgtttctcggcaagtgggatagcg

SEQ ID NO: 40473 - DNA, 41 bp, Emericella nidulans
gttctcgagacgagcgatcgccggccttcggccttttcgac

SEQ ID NO: 40474 - DNA, 45 bp, Emericella nidulans
gaattcactgcggccgccatgctaccaaaggttcatccctaactt

SEQ ID NO: 40475 - DNA, 49 bp, Emericella nidulans
gttctcgagacgagcgatcgccctactttcaactatagatgtggggaaa

SEQ ID NO: 40476 - DNA, 42 bp, Emericella nidulans
gaattcactgcggccgccatgccgcgctttgagtcgcagaga

SEQ ID NO: 40477 - DNA, 49 bp, Emericella nidulans
gttctcgagacgagcgatcgcgtgttgatggacgatatcagtggcaacc

SEQ ID NO: 40478 - DNA, 45 bp, Emericella nidulans
gaattcactgcggccgccatgcagtgagggcgagaatgtgaaccc

SEQ ID NO: 40479 - DNA, 43 bp, Emericella nidulans
gttctcgagacgagcgatcgcctcctcgttgatgctggggaag

SEQ ID NO: 40480 - DNA, 45 bp, Emericella nidulans
gaattcactgcggccgccatgcctgttccgcatggcttctatcca

SEQ ID NO: 40481 - DNA, 41 bp, Emericella nidulans
gttctcgagacgagcgatcgccgaaccagccgtgccagctt

SEQ ID NO: 40482 - DNA, 41 bp, Emericella nidulans
gaattcactgcggccgccatgtccaactgacagcgatcttg

SEQ ID NO: 40483 - DNA, 42 bp, Emericella nidulans
gttctcgagacgagcgatcgcagacgtgtaacttcggctacc

SEQ ID NO: 40484 - DNA, 41 bp, Emericella nidulans
gaattcactgcggccgccatgacgcattagtggagcggata

SEQ ID NO: 40485 - DNA, 41 bp, Emericella nidulans
gttctcgagacgagcgatcgcttcgtcgacatcaattccaa

SEQ ID NO: 40486 - DNA, 41 bp, Emericella nidulans
gaattcactgcggccgccatggcgcttgaaatcatgaatcg

SEQ ID NO: 40487 - DNA, 41 bp, Emericella nidulans
gttctcgagacgagcgatcgcccaagtcctcaatctccacc

SEQ ID NO: 40488 - DNA, 48 bp, Emericella nidulans
gaattcactgcggccgccatggttgattacgatgtcgtctccattcca

SEQ ID NO: 40489 - DNA, 41 bp, Emericella nidulans
gttctcgagacgagcgatcgcgggactggtcgcggtcttcg

SEQ ID NO: 40490 - DNA, 41 bp, Emericella nidulans
gaattcactgcggccgccatgcggaggccttgctggcattg

SEQ ID NO: 40491 - DNA, 45 bp, Emericella nidulans
gttctcgagacgagcgatcgcggcgccttccaatttccgcagctt

SEQ ID NO: 40492 - DNA, 49 bp, Emericella nidulans
gaattcactgcggccgccatgcctgcggaatcataatgttgtcagtttg

SEQ ID NO: 40493 - DNA, 45 bp, Emericella nidulans
gttctcgagacgagcgatcgcatgccagtcgccttggatattctc

SEQ ID NO: 40494 - DNA, 42 bp, Emericella nidulans
gaattcactgcggccgccatgccccgtcgtttggtatcgagt

SEQ ID NO: 40495 - DNA, 48 bp, Emericella nidulans
gttctcgagacgagcgatcgcgctagcggttctcgaaactgctcctca

SEQ ID NO: 40496 - DNA, 41 bp, Emericella nidulans
gaattcactgcggccgccatgcagagctgtcctcatctccc

SEQ ID NO: 40497 - DNA, 40 bp, Emericella nidulans
gttctcgagacgagcgatcgcgcatccccctccataaagc

SEQ ID NO: 40498 - DNA, 41 bp, Emericella nidulans
gaattcactgcggccgccatggctcgtgcgcaagctcgaca

SEQ ID NO: 40499 - DNA, 41 bp, Emericella nidulans
gttctcgagacgagcgatcgcccatggcgcagcgcaagact

SEQ ID NO: 40500 - DNA, 41 bp, Emericella nidulans
gaattcactgcggccgccatggcactcgcgccaatgcaacc

SEQ ID NO: 40501 - DNA, 44 bp, Emericella nidulans
gttctcgagacgagcgatcgctcttcatgctctcagcccactcc

SEQ ID NO: 40502 - DNA, 49 bp, Emericella nidulans
gaattcactgcggccgccatgcgaaagatggatgcaaatatgaggcaaa

SEQ ID NO: 40503 - DNA, 48 bp, Emericella nidulans
gttctcgagacgagcgatcgcgcagcggtctggataacttactttgtg

SEQ ID NO: 40504 - DNA, 49 bp, Emericella nidulans
gaattcactgcggccgccatgctcttcgtctacttctgagcttgtagcc

SEQ ID NO: 40505 - DNA, 43 bp, Emericella nidulans
gttctcgagacgagcgatcgcgagcacgaggggcagtgattcg

SEQ ID NO: 40506 - DNA, 49 bp, Emericella nidulans
gaattcactgcggccgccatgttttcttctacgccctcgataacaccgt

SEQ ID NO: 40507 - DNA, 44 bp, Emericella nidulans
gttctcgagacgagcgatcgccgacaggaataatgcgacgatca

SEQ ID NO: 40508 - DNA, 41 bp, Emericella nidulans
gaattcactgcggccgccatgccggactgtcgtgccctcgt

SEQ ID NO: 40509 - DNA, 41 bp, Emericella nidulans
gttctcgagacgagcgatcgcgccgatgtggcggcttcaaa

SEQ ID NO: 40510 - DNA, 46 bp, Emericella nidulans
gaattcactgcggccgccatgagcaacaatgcgagtagctcggctc

SEQ ID NO: 40511 - DNA, 49 bp, Emericella nidulans
gttctcgagacgagcgatcgcggccgtactagaagttgacacagctgac

SEQ ID NO: 40512 - DNA, 41 bp, Emericella nidulans
gaattcactgcggccgccatgaagccgagtatggtcgaatg

SEQ ID NO: 40513 - DNA, 41 bp, Emericella nidulans
gttctcgagacgagcgatcgccgaagtactgctttgcgatg

SEQ ID NO: 40514 - DNA, 40 bp, Emericella nidulans
gaattcactgcggccgccatgctccccgctcagggccatc

SEQ ID NO: 40515 - DNA, 42 bp, Emericella nidulans
gttctcgagacgagcgatcgctgtcgaaatcctccccgaaca

SEQ ID NO: 40516 - DNA, 48 bp, Emericella nidulans
gaattcactgcggccgccatggagcctcacaaggttgctgcggaccta

SEQ ID NO: 40517 - DNA, 41 bp, Emericella nidulans
gttctcgagacgagcgatcgccggtcgaggtgggaggctga

SEQ ID NO: 40518 - DNA, 41 bp, Emericella nidulans
gaattcactgcggccgccatgtcagggggcggaaagaccct

SEQ ID NO: 40519 - DNA, 42 bp, Emericella nidulans
gttctcgagacgagcgatcgctgcatgaacattgggcgcatc

SEQ ID NO: 40520 - DNA, 41 bp, Emericella nidulans
gaattcactgcggccgccatgatgacatcgaaaatgcgaca

SEQ ID NO: 40521 - DNA, 43 bp, Emericella nidulans
gttctcgagacgagcgatcgccgatctctaagggtaaaattgc

SEQ ID NO: 40522 - DNA, 44 bp, Emericella nidulans
gaattcactgcggccgccatgttgcgaatgggcacaaagtcaga

SEQ ID NO: 40523 - DNA, 43 bp, Emericella nidulans
gttctcgagacgagcgatcgctgtcgtgctgaccaattgaagc

SEQ ID NO: 40524 - DNA, 40 bp, Emericella nidulans
gaattcactgcggccgccatgcaagcgggccacccctgag

SEQ ID NO: 40525 - DNA, 46 bp, Emericella nidulans
gttctcgagacgagcgatcgccatccttcttcacggcgtcgacaat

SEQ ID NO: 40526 - DNA, 49 bp, Emericella nidulans
gaattcactgcggccgccatgatatcaggcatcaccatagctccataaa

SEQ ID NO: 40527 - DNA, 45 bp, Emericella nidulans
gttctcgagacgagcgatcgcctggttctcttcaaggttcgttgc

SEQ ID NO: 40528 - DNA, 41 bp, Emericella nidulans
gaattcactgcggccgccatgtgcggagtctcaatgttggt

SEQ ID NO: 40529 - DNA, 47 bp, Emericella nidulans
gttctcgagacgagcgatcgcaaagtttgtttgatgataagaatacc

SEQ ID NO: 40530 - DNA, 47 bp, Emericella nidulans
gaattcactgcggccgccatgctgtcactagcctatccccgtacaag

SEQ ID NO: 40531 - DNA, 41 bp, Emericella nidulans
gttctcgagacgagcgatcgcgcgaggtcaccgaacgagcc

SEQ ID NO: 40532 - DNA, 49 bp, Emericella nidulans
gaattcactgcggccgccatgctgtcggtaaaaataaaatgggccagga

SEQ ID NO: 40533 - DNA, 41 bp, Emericella nidulans
gttctcgagacgagcgatcgcaacgcctgcaggtgctgtgg

SEQ ID NO: 40534 - DNA, 49 bp, Emericella nidulans
gaattcactgcggccgccatgacttcaacctcgagtacacacgcaggga

SEQ ID NO: 40535 - DNA, 49 bp, Emericella nidulans
gttctcgagacgagcgatcgctcatcatcatcatcaaaatcctgttctg

SEQ ID NO: 40536 - DNA, 46 bp, Emericella nidulans
gaattcactgcggccgccatgatctagggtatgtcagtttcaacaa

SEQ ID NO: 40537 - DNA, 41 bp, Emericella nidulans
gttctcgagacgagcgatcgcgttcccaggagcacaggtta

SEQ ID NO: 40538 - DNA, 49 bp, Emericella nidulans
gaattcactgcggccgccatgcagttcctgaatgaggagaacggccaga

SEQ ID NO: 40539 - DNA, 49 bp, Emericella nidulans
gttctcgagacgagcgatcgctttctcttccattgtatgaaactgaggg

SEQ ID NO: 40540 - DNA, 49 bp, Emericella nidulans
gaattcactgcggccgccatgaacaagtatggtgactcatcacaggaca

SEQ ID NO: 40541 - DNA, 47 bp, Emericella nidulans
gttctcgagacgagcgatcgctttccgataccacatcctcgtcactg

SEQ ID NO: 40542 - DNA, 48 bp, Emericella nidulans
gaattcactgcggccgccatgagatcactggtctcactgctggatacg

SEQ ID NO: 40543 - DNA, 41 bp, Emericella nidulans
gttctcgagacgagcgatcgccgcgccaagcagagcaactg

SEQ ID NO: 40544 - DNA, 41 bp, Emericella nidulans
gaattcactgcggccgccatgatggccatctaccaaccaag

SEQ ID NO: 40545 - DNA, 41 bp, Emericella nidulans
gttctcgagacgagcgatcgcccgtgctttgactacgatgc

SEQ ID NO: 40546 - DNA, 41 bp, Emericella nidulans
gaattcactgcggccgccatgcacggcacgagtgcccacat

SEQ ID NO: 40547 - DNA, 41 bp, Emericella nidulans
gttctcgagacgagcgatcgcgcgcgtaaagggggataccg

SEQ ID NO: 40548 - DNA, 44 bp, Emericella nidulans
gaattcactgcggccgccatgtactacgcaggcgactctggcta

SEQ ID NO: 40549 - DNA, 49 bp, Emericella nidulans
gttctcgagacgagcgatcgctagtagtagtgatctggatgacggggtg

SEQ ID NO: 40550 - DNA, 41 bp, Emericella nidulans
gaattcactgcggccgccatgcctcgtacttctcgcgattc

SEQ ID NO: 40551 - DNA, 44 bp, Emericella nidulans
gttctcgagacgagcgatcgccgaagaggattgaaggtgatatg

SEQ ID NO: 40552 - DNA, 41 bp, Emericella nidulans
gaattcactgcggccgccatggctgcgtatacccaaggaaa

SEQ ID NO: 40553 - DNA, 41 bp, Emericella nidulans
gttctcgagacgagcgatcgccggtccaaagtagcccataa

SEQ ID NO: 40554 - DNA, 41 bp, Emericella nidulans
gaattcactgcggccgccatgccgtctcgtcaagggttact

SEQ ID NO: 40555 - DNA, 41 bp, Emericella nidulans
gttctcgagacgagcgatcgcgaagttctccgtgcttgctc

SEQ ID NO: 40556 - DNA, 42 bp, Emericella nidulans
gaattcactgcggccgccatgtgcgatgagccgaacctttcc

SEQ ID NO: 40557 - DNA, 49 bp, Emericella nidulans
gttctcgagacgagcgatcgcaactcgaaatcttccaggttcttcattg

SEQ ID NO: 40558 - DNA, 47 bp, Emericella nidulans
gaattcactgcggccgccatgggaagcgacagctgctacctggcttg

SEQ ID NO: 40559 - DNA, 48 bp, Emericella nidulans
gttctcgagacgagcgatcgcggagtacagataagcggcaatgactcc

SEQ ID NO: 40560 - DNA, 48 bp, Emericella nidulans
gaattcactgcggccgccatgtatacgttcgcgggtagacactgagca

SEQ ID NO: 40561 - DNA, 44 bp, Emericella nidulans
gttctcgagacgagcgatcgcgaatggcaggccatattcggtgg

SEQ ID NO: 40562 - DNA, 41 bp, Emericella nidulans
gaattcactgcggccgccatggaattctgggccgcgctcgt

SEQ ID NO: 40563 - DNA, 49 bp, Emericella nidulans
gttctcgagacgagcgatcgcgtatcccagagacttctagaaagcagca

SEQ ID NO: 40564 - DNA, 48 bp, Emericella nidulans
gaattcactgcggccgccatgtatgttattcctgttggcgccacgata

SEQ ID NO: 40565 - DNA, 47 bp, Emericella nidulans
gttctcgagacgagcgatcgcgaatgcgcccgtagttggtattaggc

SEQ ID NO: 40566 - DNA, 46 bp, Emericella nidulans
gaattcactgcggccgccatgggggcaattctggaaataggctgct

SEQ ID NO: 40567 - DNA, 42 bp, Emericella nidulans
gttctcgagacgagcgatcgcgtgggcccgtgaaatgcttcc

SEQ ID NO: 40568 - DNA, 41 bp, Emericella nidulans
gaattcactgcggccgccatgctcgccgagtgagcccgcta

SEQ ID NO: 40569 - DNA, 48 bp, Emericella nidulans
gttctcgagacgagcgatcgcaggtttccacctcttgacacgcgatcc

SEQ ID NO: 40570 - DNA, 42 bp, Emericella nidulans
gaattcactgcggccgccatgcgtccaatgcgagccatgctt

SEQ ID NO: 40571 - DNA, 41 bp, Emericella nidulans
gttctcgagacgagcgatcgcggttcaccgcgtcgttgtcg

SEQ ID NO: 40572 - DNA, 41 bp, Emericella nidulans
gaattcactgcggccgccatgagcgagattgcaaaggtgtt

SEQ ID NO: 40573 - DNA, 41 bp, Emericella nidulans
gttctcgagacgagcgatcgccaccacgttaccccagttct

SEQ ID NO: 40574 - DNA, 48 bp, Emericella nidulans
gaattcactgcggccgccatgataacatacccccattggcccaatttc

SEQ ID NO: 40575 - DNA, 41 bp, Emericella nidulans
gttctcgagacgagcgatcgcttcccctcgcctcggtcctc

SEQ ID NO: 40576 - DNA, 49 bp, Emericella nidulans
gaattcactgcggccgccatgattccaacgaattgaacacgccgagtct

SEQ ID NO: 40577 - DNA, 48 bp, Emericella nidulans
gttctcgagacgagcgatcgcattctggacctcggtctctcggcgatt

SEQ ID NO: 40578 - DNA, 45 bp, Emericella nidulans
gaattcactgcggccgccatgaacgtagtcggcacatggagtccc

SEQ ID NO: 40579 - DNA, 45 bp, Emericella nidulans
gttctcgagacgagcgatcgctatcgtcctcaccaccttgagtcg

SEQ ID NO: 40580 - DNA, 48 bp, Emericella nidulans
gaattcactgcggccgccatggcggtagtcccaccttgttagctttga

SEQ ID NO: 40581 - DNA, 42 bp, Emericella nidulans
gttctcgagacgagcgatcgccagctaaagcccggggtcgtg

SEQ ID NO: 40582 - DNA, 41 bp, Emericella nidulans
gaattcactgcggccgccatgtggccaatacgttgaagaca

SEQ ID NO: 40583 - DNA, 40 bp, Emericella nidulans
gttctcgagacgagcgatcgccgaggcatctctgtccaag

SEQ ID NO: 40584 - DNA, 47 bp, Emericella nidulans
gaattcactgcggccgccatggttctaccagctccaatgtgccccta

SEQ ID NO: 40585 - DNA, 48 bp, Emericella nidulans
gttctcgagacgagcgatcgcttgacactggatacagagtggaaatcg

SEQ ID NO: 40586 - DNA, 40 bp, Emericella nidulans
gaattcactgcggccgccatggccgcgacgcaatcaaagc

SEQ ID NO: 40587 - DNA, 41 bp, Emericella nidulans
gttctcgagacgagcgatcgctgtgggctgctgcgaagtgg

SEQ ID NO: 40588 - DNA, 41 bp, Emericella nidulans
gaattcactgcggccgccatggacactatcgcacagctcca

SEQ ID NO: 40589 - DNA, 41 bp, Emericella nidulans
gttctcgagacgagcgatcgcgctactctcgcgagcttcat

SEQ ID NO: 40590 - DNA, 49 bp, Emericella nidulans
gaattcactgcggccgccatgctccagacaactacaataagccctatgc

SEQ ID NO: 40591 - DNA, 42 bp, Emericella nidulans
gttctcgagacgagcgatcgccgccggctattgcaaggaacg

SEQ ID NO: 40592 - DNA, 45 bp, Emericella nidulans
gaattcactgcggccgccatggtgaacgaagacctatctcagttt

SEQ ID NO: 40593 - DNA, 41 bp, Emericella nidulans
gttctcgagacgagcgatcgcggacagcatatcgaccgtct

SEQ ID NO: 40594 - DNA, 40 bp, Emericella nidulans
gaattcactgcggccgccatgcgcccccgtcctgcagatt

SEQ ID NO: 40595 - DNA, 41 bp, Emericella nidulans
gttctcgagacgagcgatcgcgggagggtttcgcccacctc

SEQ ID NO: 40596 - DNA, 41 bp, Emericella nidulans
gaattcactgcggccgccatgatcgaggatgtgcgagagat

SEQ ID NO: 40597 - DNA, 44 bp, Emericella nidulans
gttctcgagacgagcgatcgcatttaaactccagtgctgccata

SEQ ID NO: 40598 - DNA, 41 bp, Emericella nidulans
gaattcactgcggccgccatgagcgttccaaaaccgagtct

SEQ ID NO: 40599 - DNA, 45 bp, Emericella nidulans
gttctcgagacgagcgatcgcttcctgagctttcttatccttctc

SEQ ID NO: 40600 - DNA, 49 bp, Emericella nidulans
gaattcactgcggccgccatgatttctagtctgcacacgatctgcgttg

SEQ ID NO: 40601 - DNA, 49 bp, Emericella nidulans
gttctcgagacgagcgatcgctctgccatgtaatacttttgcgccagca

SEQ ID NO: 40602 - DNA, 41 bp, Emericella nidulans
gaattcactgcggccgccatgtgccgcgagggttgtactcc

SEQ ID NO: 40603 - DNA, 45 bp, Emericella nidulans
gttctcgagacgagcgatcgctggatctgggcttcttgatgttgg

SEQ ID NO: 40604 - DNA, 48 bp, Emericella nidulans
gaattcactgcggccgccatgggacaactttgtcgttccttggcgagt

SEQ ID NO: 40605 - DNA, 41 bp, Emericella nidulans
gttctcgagacgagcgatcgcaattccagcgcggcgctcat

SEQ ID NO: 40606 - DNA, 43 bp, Emericella nidulans
gaattcactgcggccgccatgaatatggagtctagcagggaat

SEQ ID NO: 40607 - DNA, 41 bp, Emericella nidulans
gttctcgagacgagcgatcgcaatgccgacacagtggatta

SEQ ID NO: 40608 - DNA, 48 bp, Emericella nidulans
gaattcactgcggccgccatgaaatctaacatggatatgcaggcgttg

SEQ ID NO: 40609 - DNA, 45 bp, Emericella nidulans
gttctcgagacgagcgatcgccgccagagactgacgaggatctgt

SEQ ID NO: 40610 - DNA, 41 bp, Emericella nidulans
gaattcactgcggccgccatgcgcggccgatcagtctcaca

SEQ ID NO: 40611 - DNA, 41 bp, Emericella nidulans
gttctcgagacgagcgatcgcaaccgggtcgcgcgtgttgt

SEQ ID NO: 40612 - DNA, 41 bp, Emericella nidulans
gaattcactgcggccgccatgtcgagtcaactcggagaaca

SEQ ID NO: 40613 - DNA, 41 bp, Emericella nidulans
gttctcgagacgagcgatcgcccatatgcaagaggtgagcc

SEQ ID NO: 40614 - DNA, 41 bp, Emericella nidulans
gaattcactgcggccgccatgccgccagcaatcaacgtccc

SEQ ID NO: 40615 - DNA, 43 bp, Emericella nidulans
gttctcgagacgagcgatcgctcctgggagggcattggcagca

SEQ ID NO: 40616 - DNA, 48 bp, Emericella nidulans
gaattcactgcggccgccatgcggtaccaggcattacctcgcaccagt

SEQ ID NO: 40617 - DNA, 44 bp, Emericella nidulans
gttctcgagacgagcgatcgccgggagtggtggtattgggctgt

SEQ ID NO: 40618 - DNA, 49 bp, Emericella nidulans
gaattcactgcggccgccatgtggtttagtacaagagcaactcgcccac

SEQ ID NO: 40619 - DNA, 42 bp, Emericella nidulans
gttctcgagacgagcgatcgccgcagcaccattccctctcca

SEQ ID NO: 40620 - DNA, 41 bp, Emericella nidulans
gaattcactgcggccgccatggtggccaagcgcaaggatgc

SEQ ID NO: 40621 - DNA, 41 bp, Emericella nidulans
gttctcgagacgagcgatcgccctcgtcgcacggcagtggt

SEQ ID NO: 40622 - DNA, 41 bp, Emericella nidulans
gaattcactgcggccgccatgacaggacgaagtcgacacct

SEQ ID NO: 40623 - DNA, 41 bp, Emericella nidulans
gttctcgagacgagcgatcgcgaccactgcagagccaattc

SEQ ID NO: 40624 - DNA, 47 bp, Emericella nidulans
gaattcactgcggccgccatggatatcatcacacggattcatgagga

SEQ ID NO: 40625 - DNA, 47 bp, Emericella nidulans
gttctcgagacgagcgatcgcacctttccacaataacagcgcgcatc

SEQ ID NO: 40626 - DNA, 40 bp, Emericella nidulans
gaattcactgcggccgccatgtcgaagagcgcgaggtgct

SEQ ID NO: 40627 - DNA, 47 bp, Emericella nidulans
gttctcgagacgagcgatcgcgcctccttctcctccctcttcttcct

SEQ ID NO: 40628 - DNA, 41 bp, Emericella nidulans
gaattcactgcggccgccatggccccataatggcccgttcg

SEQ ID NO: 40629 - DNA, 47 bp, Emericella nidulans
gttctcgagacgagcgatcgcaggtttgaactttagccggcgctcgt

SEQ ID NO: 40630 - DNA, 41 bp, Emericella nidulans
gaattcactgcggccgccatgaggggaaaggagctctgtgt

SEQ ID NO: 40631 - DNA, 41 bp, Emericella nidulans
gttctcgagacgagcgatcgcgatcgaagcagttcgtagcc

SEQ ID NO: 40632 - DNA, 42 bp, Emericella nidulans
gaattcactgcggccgccatgtggtccaggcaagccgacgta

SEQ ID NO: 40633 - DNA, 42 bp, Emericella nidulans
gttctcgagacgagcgatcgccgacgtctcagcggggattga

SEQ ID NO: 40634 - DNA, 43 bp, Emericella nidulans
gaattcactgcggccgccatgcgagcacatcatcgccctatgc

SEQ ID NO: 40635 - DNA, 49 bp, Emericella nidulans
gttctcgagacgagcgatcgcgttctttcatgtcctctgagctaccctc

SEQ ID NO: 40636 - DNA, 47 bp, Emericella nidulans
gaattcactgcggccgccatgcaagctgaaggccgtacgttttcttc

SEQ ID NO: 40637 - DNA, 47 bp, Emericella nidulans
gttctcgagacgagcgatcgccttgtccttctctttctcatcgggag

SEQ ID NO: 40638 - DNA, 48 bp, Emericella nidulans
gaattcactgcggccgccatgggggagcagatgtccaatattcagtgg

SEQ ID NO: 40639 - DNA, 41 bp, Emericella nidulans
gttctcgagacgagcgatcgctcggaaagaaggcggcaaaa

SEQ ID NO: 40640 - DNA, 42 bp, Emericella nidulans
gaattcactgcggccgccatgtctctggattatccgaattgc

SEQ ID NO: 40641 - DNA, 41 bp, Emericella nidulans
gttctcgagacgagcgatcgcctgcctcgcacgtatagaaa

SEQ ID NO: 40642 - DNA, 48 bp, Emericella nidulans
gaattcactgcggccgccatgcacaatccctggatcggttacgacttt

SEQ ID NO: 40643 - DNA, 42 bp, Emericella nidulans
gttctcgagacgagcgatcgccgccgttgcattcgtcgtagc

SEQ ID NO: 40644 - DNA, 46 bp, Emericella nidulans
gaattcactgcggccgccatgcttcgacttttcctcaagcccaagg

SEQ ID NO: 40645 - DNA, 42 bp, Emericella nidulans
gttctcgagacgagcgatcgcggccgctgctatcatcgtcgt

SEQ ID NO: 40646 - DNA, 41 bp, Emericella nidulans
gaattcactgcggccgccatgcgtccgtgatcacctacact

SEQ ID NO: 40647 - DNA, 46 bp, Emericella nidulans
gttctcgagacgagcgatcgcactggtattgttggagtgtatcttt

SEQ ID NO: 40648 - DNA, 44 bp, Emericella nidulans
gaattcactgcggccgccatgttctccgcacaacccctactcca

SEQ ID NO: 40649 - DNA, 42 bp, Emericella nidulans
gttctcgagacgagcgatcgcgcggtgtctcctgacccgaaa

SEQ ID NO: 40650 - DNA, 49 bp, Emericella nidulans
gaattcactgcggccgccatggcaacggtaacaacaatatatcgcccac

SEQ ID NO: 40651 - DNA, 41 bp, Emericella nidulans
gttctcgagacgagcgatcgcaggctcaggcggctcctcgt

SEQ ID NO: 40652 - DNA, 41 bp, Emericella nidulans
gaattcactgcggccgccatgatcagatccaagaccgatgc

SEQ ID NO: 40653 - DNA, 41 bp, Emericella nidulans
gttctcgagacgagcgatcgcttcagaatttgccagtcgat

SEQ ID NO: 40654 - DNA, 47 bp, Emericella nidulans
gaattcactgcggccgccatgaacgtacatttcacctctcgaaacca

SEQ ID NO: 40655 - DNA, 41 bp, Emericella nidulans
gttctcgagacgagcgatcgcggggcaccatgctcgcagat

SEQ ID NO: 40656 - DNA, 41 bp, Emericella nidulans
gaattcactgcggccgccatgattgaatttccctcggtcct

SEQ ID NO: 40657 - DNA, 41 bp, Emericella nidulans
gttctcgagacgagcgatcgcgagggacagagactgcgact

SEQ ID NO: 40658 - DNA, 41 bp, Emericella nidulans
gaattcactgcggccgccatggttccgagtcttccctttcg

SEQ ID NO: 40659 - DNA, 43 bp, Emericella nidulans
gttctcgagacgagcgatcgccttctgcatccacttcagtgtc

SEQ ID NO: 40660 - DNA, 43 bp, Emericella nidulans
gaattcactgcggccgccatgtcagcttccaatctgtacatgg

SEQ ID NO: 40661 - DNA, 43 bp, Emericella nidulans
gttctcgagacgagcgatcgccggtggtacctactcactagcc

SEQ ID NO: 40662 - DNA, 46 bp, Emericella nidulans
gaattcactgcggccgccatgcactccgtgaaggttcgtgaagagg

SEQ ID NO: 40663 - DNA, 46 bp, Emericella nidulans
gttctcgagacgagcgatcgcttgcagatgttttggcacttccgta

SEQ ID NO: 40664 - DNA, 43 bp, Emericella nidulans
gaattcactgcggccgccatgggctctggcacaggcagtaggc

SEQ ID NO: 40665 - DNA, 41 bp, Emericella nidulans
gttctcgagacgagcgatcgccgagcgcttggactgggctc

SEQ ID NO: 40666 - DNA, 43 bp, Emericella nidulans
gaattcactgcggccgccatggttgtgttcttccatcaacagc

SEQ ID NO: 40667 - DNA, 41 bp, Emericella nidulans
gttctcgagacgagcgatcgctaactccccacgaaacatcc

SEQ ID NO: 40668 - DNA, 47 bp, Emericella nidulans
gaattcactgcggccgccatggcagcagacgggcataagatacatgg

SEQ ID NO: 40669 - DNA, 41 bp, Emericella nidulans
gttctcgagacgagcgatcgcccccggctcaagacgttcca

SEQ ID NO: 40670 - DNA, 41 bp, Emericella nidulans
gaattcactgcggccgccatgtgatcggcatgatcactttg

SEQ ID NO: 40671 - DNA, 41 bp, Emericella nidulans
gttctcgagacgagcgatcgctgtctatgccatcctcacca

SEQ ID NO: 40672 - DNA, 47 bp, Emericella nidulans
gaattcactgcggccgccatgagcagcggagcagaataggattacgg

SEQ ID NO: 40673 - DNA, 44 bp, Emericella nidulans
gttctcgagacgagcgatcgcattgagcgcacccaacaacttca

SEQ ID NO: 40674 - DNA, 41 bp, Emericella nidulans
gaattcactgcggccgccatgacggtagcgaatcactccaa

SEQ ID NO: 40675 - DNA, 40 bp, Emericella nidulans
gttctcgagacgagcgatcgcgctctcagcttcgcatcac

SEQ ID NO: 40676 - DNA, 42 bp, Emericella nidulans
gaattcactgcggccgccatgcttccgagagctcagcgaggc

SEQ ID NO: 40677 - DNA, 47 bp, Emericella nidulans
gttctcgagacgagcgatcgccgctaagacctcattccagtacttcg

SEQ ID NO: 40678 - DNA, 49 bp, Emericella nidulans
gaattcactgcggccgccatggattgagaaatccaatgtccttcttttg

SEQ ID NO: 40679 - DNA, 49 bp, Emericella nidulans
gttctcgagacgagcgatcgcacctttatgaggtacattacctccaccc

SEQ ID NO: 40680 - DNA, 41 bp, Emericella nidulans
gaattcactgcggccgccatgcaccatacgggagcaacata

SEQ ID NO: 40681 - DNA, 41 bp, Emericella nidulans
gttctcgagacgagcgatcgctggcttgtcggtgatgtaga

SEQ ID NO: 40682 - DNA, 41 bp, Emericella nidulans
gaattcactgcggccgccatgcgctggccaccatcgcctac

SEQ ID NO: 40683 - DNA, 48 bp, Emericella nidulans
gttctcgagacgagcgatcgcgacgaatttctgcgcaaactcggtcca

SEQ ID NO: 40684 - DNA, 42 bp, Emericella nidulans
gaattcactgcggccgccatgatgttggtgcctattataccg

SEQ ID NO: 40685 - DNA, 45 bp, Emericella nidulans
gttctcgagacgagcgatcgcaaaaggtgattacactgaccagaa

SEQ ID NO: 40686 - DNA, 41 bp, Emericella nidulans
gaattcactgcggccgccatggtgtgctacgcagctttgaa

SEQ ID NO: 40687 - DNA, 45 bp, Emericella nidulans
gttctcgagacgagcgatcgcattgcaagcgagtaattaagagca

SEQ ID NO: 40688 - DNA, 41 bp, Emericella nidulans
gaattcactgcggccgccatgggtccagaacgaatggattg

SEQ ID NO: 40689 - DNA, 46 bp, Emericella nidulans
gttctcgagacgagcgatcgcaaaaactccttgatgagttcgtgtc

SEQ ID NO: 40690 - DNA, 41 bp, Emericella nidulans
gaattcactgcggccgccatgtcccttcaagaccaatggag

SEQ ID NO: 40691 - DNA, 39 bp, Emericella nidulans
gttctcgagacgagcgatcgcgaaaggacttggggaagg

SEQ ID NO: 40692 - DNA, 41 bp, Emericella nidulans
gaattcactgcggccgccatgctcagctccgaggtcagaat

SEQ ID NO: 40693 - DNA, 41 bp, Emericella nidulans
gttctcgagacgagcgatcgcaggtcctccttccgtttgtt

SEQ ID NO: 40694 - DNA, 41 bp, Emericella nidulans
gaattcactgcggccgccatgccccagccctaaacggctcc

SEQ ID NO: 40695 - DNA, 44 bp, Emericella nidulans
gttctcgagacgagcgatcgccgcgaccatcatgagctgctaga

SEQ ID NO: 40696 - DNA, 41 bp, Emericella nidulans
gaattcactgcggccgccatgcgtcactgaggaacaatgga

SEQ ID NO: 40697 - DNA, 41 bp, Emericella nidulans
gttctcgagacgagcgatcgcatccttgatcacgagcgaat

SEQ ID NO: 40698 - DNA, 41 bp, Emericella nidulans
gaattcactgcggccgccatgcggagatgatccccgccatc

SEQ ID NO: 40699 - DNA, 41 bp, Emericella nidulans
gttctcgagacgagcgatcgcgatgggccagctttccatcg

SEQ ID NO: 40700 - DNA, 43 bp, Emericella nidulans
gaattcactgcggccgccatggccggtcatgttcatcgccttc

SEQ ID NO: 40701 - DNA, 41 bp, Emericella nidulans
gttctcgagacgagcgatcgcgcggcctgcaccgatgagat

SEQ ID NO: 40702 - DNA, 49 bp, Emericella nidulans
gaattcactgcggccgccatgctaaggaagatattgagaacgagcaacg

SEQ ID NO: 40703 - DNA, 41 bp, Emericella nidulans
gttctcgagacgagcgatcgcattgggatgcgggggaagga

SEQ ID NO: 40704 - DNA, 49 bp, Emericella nidulans
gaattcactgcggccgccatgactgacctggatagattttggaagaagg

SEQ ID NO: 40705 - DNA, 49 bp, Emericella nidulans
gttctcgagacgagcgatcgccgatttgtctaactttacaccgggacca

SEQ ID NO: 40706 - DNA, 43 bp, Emericella nidulans
gaattcactgcggccgccatgagattacgccatccgagccaca

SEQ ID NO: 40707 - DNA, 46 bp, Emericella nidulans
gttctcgagacgagcgatcgccacctcatccgtatcccaccgatca

SEQ ID NO: 40708 - DNA, 48 bp, Emericella nidulans
gaattcactgcggccgccatgggaagatattgcaacgtgatctgggac

SEQ ID NO: 40709 - DNA, 41 bp, Emericella nidulans
gttctcgagacgagcgatcgcagcggccgaggactgcttgc

SEQ ID NO: 40710 - DNA, 44 bp, Emericella nidulans
gaattcactgcggccgccatgtcccgaccatacaactcactccc

SEQ ID NO: 40711 - DNA, 49 bp, Emericella nidulans
gttctcgagacgagcgatcgctaagttaaggcgatcaatgatgtgaagc

SEQ ID NO: 40712 - DNA, 46 bp, Emericella nidulans
gaattcactgcggccgccatgcttttattccagagtttgtgtatga

SEQ ID NO: 40713 - DNA, 41 bp, Emericella nidulans
gttctcgagacgagcgatcgcgcaagcacctttggatcttc

SEQ ID NO: 40714 - DNA, 44 bp, Emericella nidulans
gaattcactgcggccgccatggtgtagaacttgtatggcggttt

SEQ ID NO: 40715 - DNA, 41 bp, Emericella nidulans
gttctcgagacgagcgatcgcaaagcccgacttgtagcaaa

SEQ ID NO: 40716 - DNA, 48 bp, Emericella nidulans
gaattcactgcggccgccatgcctaggctattgcagagggctacctca

SEQ ID NO: 40717 - DNA, 49 bp, Emericella nidulans
gttctcgagacgagcgatcgcggctgtaaaagtcaataaagcctggatg

SEQ ID NO: 40718 - DNA, 41 bp, Emericella nidulans
gaattcactgcggccgccatggcgaaccgctcatcgccagt

SEQ ID NO: 40719 - DNA, 41 bp, Emericella nidulans
gttctcgagacgagcgatcgcgcggcagtggctgcacagag

SEQ ID NO: 40720 - DNA, 48 bp, Emericella nidulans
gaattcactgcggccgccatgcgatatacacgatgacgacgcccggta

SEQ ID NO: 40721 - DNA, 41 bp, Emericella nidulans
gttctcgagacgagcgatcgccccagagctttcgcctgcaa

SEQ ID NO: 40722 - DNA, 49 bp, Emericella nidulans
gaattcactgcggccgccatgccttgttcctataatatgccgttgtacg

SEQ ID NO: 40723 - DNA, 49 bp, Emericella nidulans
gttctcgagacgagcgatcgctggaaggaaggagtatagggggcccaaa

SEQ ID NO: 40724 - DNA, 41 bp, Emericella nidulans
gaattcactgcggccgccatgcgcgtatgcctgcgcaattc

SEQ ID NO: 40725 - DNA, 41 bp, Emericella nidulans
gttctcgagacgagcgatcgccacggcaacgacagccgcta

SEQ ID NO: 40726 - DNA, 41 bp, Emericella nidulans
gaattcactgcggccgccatggccgtcgcatcttttgggtg

SEQ ID NO: 40727 - DNA, 46 bp, Emericella nidulans
gttctcgagacgagcgatcgctctcggggagattcttgaagagaca

SEQ ID NO: 40728 - DNA, 43 bp, Emericella nidulans
gaattcactgcggccgccatgggagaacggattcgggcgaggt

SEQ ID NO: 40729 - DNA, 46 bp, Emericella nidulans
gttctcgagacgagcgatcgcgtacgctgtcggcaaccatatcacc

SEQ ID NO: 40730 - DNA, 41 bp, Emericella nidulans
gaattcactgcggccgccatgtgctgccttgcttccgccta

SEQ ID NO: 40731 - DNA, 49 bp, Emericella nidulans
gttctcgagacgagcgatcgctacctatctttcaagttcgacgcggtgc

SEQ ID NO: 40732 - DNA, 43 bp, Emericella nidulans
gaattcactgcggccgccatgggagatgcttacaggaaagaag

SEQ ID NO: 40733 - DNA, 45 bp, Emericella nidulans
gttctcgagacgagcgatcgctctataaaaggatctgatggattg

SEQ ID NO: 40734 - DNA, 48 bp, Emericella nidulans
gaattcactgcggccgccatgcatcagcaatttcactgtagacaccca

SEQ ID NO: 40735 - DNA, 45 bp, Emericella nidulans
gttctcgagacgagcgatcgctagccttccaccccgtaactaccc

SEQ ID NO: 40736 - DNA, 44 bp, Emericella nidulans
gaattcactgcggccgccatgcgtcggtgactcggtgtctaatc

SEQ ID NO: 40737 - DNA, 45 bp, Emericella nidulans
gttctcgagacgagcgatcgcggtgagttggcccaatcgctacaa

SEQ ID NO: 40738 - DNA, 49 bp, Emericella nidulans
gaattcactgcggccgccatgattagatatttcttgttgattactgatg

SEQ ID NO: 40739 - DNA, 41 bp, Emericella nidulans
gttctcgagacgagcgatcgctccatgtaggtgcatccaag

SEQ ID NO: 40740 - DNA, 41 bp, Emericella nidulans
gaattcactgcggccgccatgtctgtcctcgcgtcatctgc

SEQ ID NO: 40741 - DNA, 49 bp, Emericella nidulans
gttctcgagacgagcgatcgctttaattcctaagatccgtggccgcaat

SEQ ID NO: 40742 - DNA, 49 bp, Emericella nidulans
gaattcactgcggccgccatgagaacatgaacataatcctcgacatcct

SEQ ID NO: 40743 - DNA, 49 bp, Emericella nidulans
gttctcgagacgagcgatcgctcgcaccaatatttaccctagccgcaat

SEQ ID NO: 40744 - DNA, 42 bp, Emericella nidulans
gaattcactgcggccgccatgtgccattgatgcagtcgcaag

SEQ ID NO: 40745 - DNA, 42 bp, Emericella nidulans
gttctcgagacgagcgatcgccagcgtcacggtgatgccatt

SEQ ID NO: 40746 - DNA, 45 bp, Emericella nidulans
gaattcactgcggccgccatggcatgtgcatcactcgtcttttga

SEQ ID NO: 40747 - DNA, 44 bp, Emericella nidulans
gttctcgagacgagcgatcgcaaggacccaccccaaacatgcag

SEQ ID NO: 40748 - DNA, 49 bp, Emericella nidulans
gaattcactgcggccgccatgttttcttgtagacgacaaaagcgccctc

SEQ ID NO: 40749 - DNA, 42 bp, Emericella nidulans
gttctcgagacgagcgatcgccgttgtgggcagctcgaatgg

SEQ ID NO: 40750 - DNA, 41 bp, Emericella nidulans
gaattcactgcggccgccatgcggcctttggcgggtatcag

SEQ ID NO: 40751 - DNA, 44 bp, Emericella nidulans
gttctcgagacgagcgatcgcaaaggcacaacaggctcactcag

SEQ ID NO: 40752 - DNA, 41 bp, Emericella nidulans
gaattcactgcggccgccatgccgatctcgcccctcggttc

SEQ ID NO: 40753 - DNA, 42 bp, Emericella nidulans
gttctcgagacgagcgatcgcacgagcgaccataatcggacc

SEQ ID NO: 40754 - DNA, 41 bp, Emericella nidulans
gaattcactgcggccgccatgttgcgccagcctatgccacc

SEQ ID NO: 40755 - DNA, 43 bp, Emericella nidulans
gttctcgagacgagcgatcgccgggagcttcgatctcgggaat

SEQ ID NO: 40756 - DNA, 49 bp, Emericella nidulans
gaattcactgcggccgccatgttggtttgatgtgaagggtgttattctt

SEQ ID NO: 40757 - DNA, 45 bp, Emericella nidulans
gttctcgagacgagcgatcgcgaccgttgccagtagttccctcca

SEQ ID NO: 40758 - DNA, 47 bp, Emericella nidulans
gaattcactgcggccgccatgtacgttcttgacgaggtgaaggaccc

SEQ ID NO: 40759 - DNA, 49 bp, Emericella nidulans
gttctcgagacgagcgatcgccttgtcccacaagacaactgaagatcca

SEQ ID NO: 40760 - DNA, 41 bp, Emericella nidulans
gaattcactgcggccgccatgggacatatgtcgcagatccc

SEQ ID NO: 40761 - DNA, 41 bp, Emericella nidulans
gttctcgagacgagcgatcgcacagctccagctgcgttaaa

SEQ ID NO: 40762 - DNA, 41 bp, Emericella nidulans
gaattcactgcggccgccatgtagagaacgggatccaggaa

SEQ ID NO: 40763 - DNA, 40 bp, Emericella nidulans
gttctcgagacgagcgatcgcgggtaccgcagtggatttc

SEQ ID NO: 40764 - DNA, 49 bp, Emericella nidulans
gaattcactgcggccgccatgctttcatctctgttgttttggcctggtg

SEQ ID NO: 40765 - DNA, 41 bp, Emericella nidulans
gttctcgagacgagcgatcgccccactagccagccggtgaa

SEQ ID NO: 40766 - DNA, 43 bp, Emericella nidulans
gaattcactgcggccgccatgtgagcagtcgggtgctcgatgt

SEQ ID NO: 40767 - DNA, 42 bp, Emericella nidulans
gttctcgagacgagcgatcgcccccaaccaccatgaggaggg

SEQ ID NO: 40768 - DNA, 47 bp, Emericella nidulans
gaattcactgcggccgccatgatttgagcagaccaagaccgattatg

SEQ ID NO: 40769 - DNA, 46 bp, Emericella nidulans
gttctcgagacgagcgatcgctcctgtctgttgtgggtagaaagca

SEQ ID NO: 40770 - DNA, 44 bp, Emericella nidulans
gaattcactgcggccgccatgtcagcagatgccaacagcgagat

SEQ ID NO: 40771 - DNA, 47 bp, Emericella nidulans
gttctcgagacgagcgatcgcggtcttcgaagaattctgggcaggtg

SEQ ID NO: 40772 - DNA, 45 bp, Emericella nidulans
gaattcactgcggccgccatgcaaaaatcgaccttggcatgctcc

SEQ ID NO: 40773 - DNA, 46 bp, Emericella nidulans
gttctcgagacgagcgatcgctttcagcccttccttttccgaggac

SEQ ID NO: 40774 - DNA, 41 bp, Emericella nidulans
gaattcactgcggccgccatgtcaaaggtcagcacaacacc

SEQ ID NO: 40775 - DNA, 41 bp, Emericella nidulans
gttctcgagacgagcgatcgcttgtcgtcccctttcatctc

SEQ ID NO: 40776 - DNA, 48 bp, Emericella nidulans
gaattcactgcggccgccatggctttgtgctgaaccacatcttcatcc

SEQ ID NO: 40777 - DNA, 46 bp, Emericella nidulans
gttctcgagacgagcgatcgcgacgatgtggtcggcgaccttgttt

SEQ ID NO: 40778 - DNA, 46 bp, Emericella nidulans
gaattcactgcggccgccatggtccaacaacctatggtggggcaat

SEQ ID NO: 40779 - DNA, 43 bp, Emericella nidulans
gttctcgagacgagcgatcgcgccgcgtttgaaatttccgttg

SEQ ID NO: 40780 - DNA, 49 bp, Emericella nidulans
gaattcactgcggccgccatggataaatgcttgtgacaaacccgatagt

SEQ ID NO: 40781 - DNA, 41 bp, Emericella nidulans
gttctcgagacgagcgatcgcttcgcctgccatgctgttcc

SEQ ID NO: 40782 - DNA, 47 bp, Emericella nidulans
gaattcactgcggccgccatgacgtaagaatatcttcgtcgactagc

SEQ ID NO: 40783 - DNA, 41 bp, Emericella nidulans
gttctcgagacgagcgatcgctcgaccatttgtcagctcag

SEQ ID NO: 40784 - DNA, 41 bp, Emericella nidulans
gaattcactgcggccgccatgagatcgcatgatgaactccc

SEQ ID NO: 40785 - DNA, 41 bp, Emericella nidulans
gttctcgagacgagcgatcgctccacagcagtcgctacaac

SEQ ID NO: 40786 - DNA, 41 bp, Emericella nidulans
gaattcactgcggccgccatgagtagacgcgtcgaactggt

SEQ ID NO: 40787 - DNA, 40 bp, Emericella nidulans
gttctcgagacgagcgatcgcgcatcccatttgcctttct

SEQ ID NO: 40788 - DNA, 41 bp, Emericella nidulans
gaattcactgcggccgccatgggtgggtgtgaccgcaacga

SEQ ID NO: 40789 - DNA, 46 bp, Emericella nidulans
gttctcgagacgagcgatcgcgccgatgcacacatagtaccccaac

SEQ ID NO: 40790 - DNA, 41 bp, Emericella nidulans
gaattcactgcggccgccatgcgtccggcaagaagatagag

SEQ ID NO: 40791 - DNA, 42 bp, Emericella nidulans
gttctcgagacgagcgatcgcatcttgacgtgcagtcgctca

SEQ ID NO: 40792 - DNA, 41 bp, Emericella nidulans
gaattcactgcggccgccatgattcatgcgctggtcttctc

SEQ ID NO: 40793 - DNA, 43 bp, Emericella nidulans
gttctcgagacgagcgatcgcaagaacatcaatcttcactccc

SEQ ID NO: 40794 - DNA, 45 bp, Emericella nidulans
gaattcactgcggccgccatgagcgcgacaaggatgagactacgc

SEQ ID NO: 40795 - DNA, 41 bp, Emericella nidulans
gttctcgagacgagcgatcgcagccggccggtaccaccaat

SEQ ID NO: 40796 - DNA, 48 bp, Emericella nidulans
gaattcactgcggccgccatgctccacttccgtcatcttttgatactg

SEQ ID NO: 40797 - DNA, 48 bp, Emericella nidulans
gttctcgagacgagcgatcgcagagtggtaatgccggtcgtagactgt

SEQ ID NO: 40798 - DNA, 41 bp, Emericella nidulans
gaattcactgcggccgccatgccacaagtaccgtcctctcc

SEQ ID NO: 40799 - DNA, 41 bp, Emericella nidulans
gttctcgagacgagcgatcgctgtcttcggtctccggaata

SEQ ID NO: 40800 - DNA, 45 bp, Emericella nidulans
gaattcactgcggccgccatgctatagggacagacaccccgaggc

SEQ ID NO: 40801 - DNA, 49 bp, Emericella nidulans
gttctcgagacgagcgatcgctccgtcaaaatacttagcgatttcctcc

SEQ ID NO: 40802 - DNA, 48 bp, Emericella nidulans
gaattcactgcggccgccatgttgagtcgatcgaaaaagaggccgaat

SEQ ID NO: 40803 - DNA, 42 bp, Emericella nidulans
gttctcgagacgagcgatcgccacggctgacggcatagaacg

SEQ ID NO: 40804 - DNA, 41 bp, Emericella nidulans
gaattcactgcggccgccatgaaccccggcgctctcattcc

SEQ ID NO: 40805 - DNA, 46 bp, Emericella nidulans
gttctcgagacgagcgatcgccggcaagaagctcttcgagataggg

SEQ ID NO: 40806 - DNA, 41 bp, Emericella nidulans
gaattcactgcggccgccatggaccaaatggacacaactgg

SEQ ID NO: 40807 - DNA, 41 bp, Emericella nidulans
gttctcgagacgagcgatcgctgacaggcaccaccatgtat

SEQ ID NO: 40808 - DNA, 48 bp, Emericella nidulans
gaattcactgcggccgccatgtctaccctctaacacaagcggatgagc

SEQ ID NO: 40809 - DNA, 44 bp, Emericella nidulans
gttctcgagacgagcgatcgcggatacctcagcatcagcctccc

SEQ ID NO: 40810 - DNA, 42 bp, Emericella nidulans
gaattcactgcggccgccatgccacggcagtcgatttatact

SEQ ID NO: 40811 - DNA, 41 bp, Emericella nidulans
gttctcgagacgagcgatcgccgctgggtacgagaggacta

SEQ ID NO: 40812 - DNA, 41 bp, Emericella nidulans
gaattcactgcggccgccatgcagccgccatcacgccaata

SEQ ID NO: 40813 - DNA, 49 bp, Emericella nidulans
gttctcgagacgagcgatcgcagcgagcgatatacgagatatacaccag

SEQ ID NO: 40814 - DNA, 49 bp, Emericella nidulans
gaattcactgcggccgccatgtaactaacaagacccttgtaacccacga

SEQ ID NO: 40815 - DNA, 49 bp, Emericella nidulans
gttctcgagacgagcgatcgcgtgtgataacatatgtgcccctgcgttg

SEQ ID NO: 40816 - DNA, 49 bp, Emericella nidulans
gaattcactgcggccgccatgggagatactagcatcaatcgtgacttgg

SEQ ID NO: 40817 - DNA, 49 bp, Emericella nidulans
gttctcgagacgagcgatcgccgcgaatttgtcagaccaaaagccccta

SEQ ID NO: 40818 - DNA, 49 bp, Emericella nidulans
gaattcactgcggccgccatgcgagcttcggaaaatctaccgtcgacaa

SEQ ID NO: 40819 - DNA, 41 bp, Emericella nidulans
gttctcgagacgagcgatcgctgccgcaggaaagcgacctc

SEQ ID NO: 40820 - DNA, 41 bp, Emericella nidulans
gaattcactgcggccgccatgaaccttggacgaaggtcaca

SEQ ID NO: 40821 - DNA, 40 bp, Emericella nidulans
gttctcgagacgagcgatcgcagccaatatcctgcccaag

SEQ ID NO: 40822 - DNA, 43 bp, Emericella nidulans
gaattcactgcggccgccatgtcactgcttgctcggtgacttc

SEQ ID NO: 40823 - DNA, 44 bp, Emericella nidulans
gttctcgagacgagcgatcgccacacttccacaatccaggtggg

SEQ ID NO: 40824 - DNA, 49 bp, Emericella nidulans
gaattcactgcggccgccatgtgtacccctacactacaaaggcgggcac

SEQ ID NO: 40825 - DNA, 48 bp, Emericella nidulans
gttctcgagacgagcgatcgcaataggagcttggcgttcaaattatgg

SEQ ID NO: 40826 - DNA, 42 bp, Emericella nidulans
gaattcactgcggccgccatgccacatgcgaatcccaactgt

SEQ ID NO: 40827 - DNA, 48 bp, Emericella nidulans
gttctcgagacgagcgatcgcatcaacaacatcaaagctggtcccaca

SEQ ID NO: 40828 - DNA, 41 bp, Emericella nidulans
gaattcactgcggccgccatgcctcgtcaccggctgcagtg

SEQ ID NO: 40829 - DNA, 49 bp, Emericella nidulans
gttctcgagacgagcgatcgccagcgctttctggtagagtgagttttcg

SEQ ID NO: 40830 - DNA, 42 bp, Emericella nidulans
gaattcactgcggccgccatgtcttcgacgacggagccatgc

SEQ ID NO: 40831 - DNA, 43 bp, Emericella nidulans
gttctcgagacgagcgatcgcctcaggctgggttacaggctca

SEQ ID NO: 40832 - DNA, 45 bp, Emericella nidulans
gaattcactgcggccgccatgtgagggtcacgatgtttttctcca

SEQ ID NO: 40833 - DNA, 44 bp, Emericella nidulans
gttctcgagacgagcgatcgcgctcttgcatgaaccggatttcg

SEQ ID NO: 40834 - DNA, 46 bp, Emericella nidulans
gaattcactgcggccgccatggccgtactcgtgagactacggaggg

SEQ ID NO: 40835 - DNA, 46 bp, Emericella nidulans
gttctcgagacgagcgatcgcccgctctttctccatcctcaactcg

SEQ ID NO: 40836 - DNA, 41 bp, Emericella nidulans
gaattcactgcggccgccatgccgatcaccatggccggagt

SEQ ID NO: 40837 - DNA, 40 bp, Emericella nidulans
gttctcgagacgagcgatcgcgggccccatggaggtctcg

SEQ ID NO: 40838 - DNA, 41 bp, Emericella nidulans
gaattcactgcggccgccatggcctcgtgttcccatacaag

SEQ ID NO: 40839 - DNA, 45 bp, Emericella nidulans
gttctcgagacgagcgatcgctgtttgtgtccaacagtaatagcc

SEQ ID NO: 40840 - DNA, 45 bp, Emericella nidulans
gaattcactgcggccgccatggaaatactggagaccaaatttcaa

SEQ ID NO: 40841 - DNA, 39 bp, Emericella nidulans
gttctcgagacgagcgatcgcccatgttccctgggcttg

SEQ ID NO: 40842 - DNA, 45 bp, Emericella nidulans
gaattcactgcggccgccatggtaaatcggaaggcgttgaaggct

SEQ ID NO: 40843 - DNA, 49 bp, Emericella nidulans
gttctcgagacgagcgatcgcttagtggttggtaagctgaaactgggac

SEQ ID NO: 40844 - DNA, 41 bp, Emericella nidulans
gaattcactgcggccgccatgcccaggaacaagatcagcat

SEQ ID NO: 40845 - DNA, 41 bp, Emericella nidulans
gttctcgagacgagcgatcgcaagatatccgccagcactgt

SEQ ID NO: 40846 - DNA, 40 bp, Emericella nidulans
gaattcactgcggccgccatgcgcagggtgtgccgtacaa

SEQ ID NO: 40847 - DNA, 46 bp, Emericella nidulans
gttctcgagacgagcgatcgccctgtatccctgggggttgttcttg

SEQ ID NO: 40848 - DNA, 45 bp, Emericella nidulans
gaattcactgcggccgccatgaatgaacgggctcgagttggttgt

SEQ ID NO: 40849 - DNA, 41 bp, Emericella nidulans
gttctcgagacgagcgatcgcgcgcagggatggcctcatct

SEQ ID NO: 40850 - DNA, 41 bp, Emericella nidulans
gaattcactgcggccgccatgcgacatcgatgcctattttg

SEQ ID NO: 40851 - DNA, 41 bp, Emericella nidulans
gttctcgagacgagcgatcgccagcatctctgactgcttcg

SEQ ID NO: 40852 - DNA, 41 bp, Emericella nidulans
gaattcactgcggccgccatgctcttcgccatgctcttttc

SEQ ID NO: 40853 - DNA, 41 bp, Emericella nidulans
gttctcgagacgagcgatcgcgctggatcgaactgaaccat

SEQ ID NO: 40854 - DNA, 44 bp, Emericella nidulans
gaattcactgcggccgccatgattcctccccgtacgagtcctcc

SEQ ID NO: 40855 - DNA, 41 bp, Emericella nidulans
gttctcgagacgagcgatcgcgcccgccgtcctggttcttc

SEQ ID NO: 40856 - DNA, 41 bp, Emericella nidulans
gaattcactgcggccgccatgagaagacccccgatgaatct

SEQ ID NO: 40857 - DNA, 41 bp, Emericella nidulans
gttctcgagacgagcgatcgcccaagggtcgaattatacgg

SEQ ID NO: 40858 - DNA, 48 bp, Emericella nidulans
gaattcactgcggccgccatgcttgcagtcataagctcccgctgcctc

SEQ ID NO: 40859 - DNA, 47 bp, Emericella nidulans
gttctcgagacgagcgatcgcactgtgcataccaatcctggaccttc

SEQ ID NO: 40860 - DNA, 41 bp, Emericella nidulans
gaattcactgcggccgccatgaacaccatgcagcccctcca

SEQ ID NO: 40861 - DNA, 49 bp, Emericella nidulans
gttctcgagacgagcgatcgcagaggagacttacaagattgtccactcg

SEQ ID NO: 40862 - DNA, 41 bp, Emericella nidulans
gaattcactgcggccgccatgtggggaaggccagcttgacg

SEQ ID NO: 40863 - DNA, 46 bp, Emericella nidulans
gttctcgagacgagcgatcgctccatttattgccaaagacaactcg

SEQ ID NO: 40864 - DNA, 44 bp, Emericella nidulans
gaattcactgcggccgccatgcagcctcgaatcttcgcaatgtc

SEQ ID NO: 40865 - DNA, 41 bp, Emericella nidulans
gttctcgagacgagcgatcgcgaatggcgtggcagcgcata

SEQ ID NO: 40866 - DNA, 44 bp, Emericella nidulans
gaattcactgcggccgccatgaacacgtcagacacgcctaagca

SEQ ID NO: 40867 - DNA, 43 bp, Emericella nidulans
gttctcgagacgagcgatcgccgctcaacctggactttgtccc

SEQ ID NO: 40868 - DNA, 41 bp, Emericella nidulans
gaattcactgcggccgccatgttcatccgagccagggccac

SEQ ID NO: 40869 - DNA, 45 bp, Emericella nidulans
gttctcgagacgagcgatcgcattgggttcctgcaggctggagat

SEQ ID NO: 40870 - DNA, 46 bp, Emericella nidulans
gaattcactgcggccgccatgccccagtttacgactcgtcgcctta

SEQ ID NO: 40871 - DNA, 41 bp, Emericella nidulans
gttctcgagacgagcgatcgccgcagcgccgtctggatgat

SEQ ID NO: 40872 - DNA, 41 bp, Emericella nidulans
gaattcactgcggccgccatgcaacccctgcgcgacgacta

SEQ ID NO: 40873 - DNA, 44 bp, Emericella nidulans
gttctcgagacgagcgatcgcttccaagctccgtccaatggcta

SEQ ID NO: 40874 - DNA, 43 bp, Emericella nidulans
gaattcactgcggccgccatgggactgggtgacagacgggtgc

SEQ ID NO: 40875 - DNA, 41 bp, Emericella nidulans
gttctcgagacgagcgatcgccgcactcgccctcgcatttc

SEQ ID NO: 40876 - DNA, 42 bp, Emericella nidulans
gaattcactgcggccgccatggcaggaaattcttgacgcttt

SEQ ID NO: 40877 - DNA, 41 bp, Emericella nidulans
gttctcgagacgagcgatcgctggcattaatggcaacatca

SEQ ID NO: 40878 - DNA, 41 bp, Emericella nidulans
gaattcactgcggccgccatgagctttcgtcgaaaacgtca

SEQ ID NO: 40879 - DNA, 41 bp, Emericella nidulans
gttctcgagacgagcgatcgcgccggttcttctcttcctct

SEQ ID NO: 40880 - DNA, 42 bp, Emericella nidulans
gaattcactgcggccgccatgcctcaatcaagcgctgcgtca

SEQ ID NO: 40881 - DNA, 49 bp, Emericella nidulans
gttctcgagacgagcgatcgcaacaatttcagtccaaacctcctctgga

SEQ ID NO: 40882 - DNA, 42 bp, Emericella nidulans
gaattcactgcggccgccatgtgcccagacgtcgcattaccc

SEQ ID NO: 40883 - DNA, 41 bp, Emericella nidulans
gttctcgagacgagcgatcgcgcggagacggcgaacgtgag

SEQ ID NO: 40884 - DNA, 40 bp, Emericella nidulans
gaattcactgcggccgccatgacttcgggcagccgccatc

SEQ ID NO: 40885 - DNA, 45 bp, Emericella nidulans
gttctcgagacgagcgatcgcgacagggttccatttgctgctatg

SEQ ID NO: 40886 - DNA, 41 bp, Emericella nidulans
gaattcactgcggccgccatgtgcgagacccctcagagtcg

SEQ ID NO: 40887 - DNA, 42 bp, Emericella nidulans
gttctcgagacgagcgatcgcggccgctggtgacaatgaaga

SEQ ID NO: 40888 - DNA, 43 bp, Emericella nidulans
gaattcactgcggccgccatgtgtacgggagctcgcctcaagc

SEQ ID NO: 40889 - DNA, 44 bp, Emericella nidulans
gttctcgagacgagcgatcgcttggactttgagcgtttcttgga

SEQ ID NO: 40890 - DNA, 41 bp, Emericella nidulans
gaattcactgcggccgccatgcgccatcgtgaacgcctgtc

SEQ ID NO: 40891 - DNA, 42 bp, Emericella nidulans
gttctcgagacgagcgatcgctgggacgaacaggatgggctc

SEQ ID NO: 40892 - DNA, 49 bp, Emericella nidulans
gaattcactgcggccgccatgttcgttatcttttgttggagaagatccc

SEQ ID NO: 40893 - DNA, 48 bp, Emericella nidulans
gttctcgagacgagcgatcgcgtctcggccttaatccgagagaaatcc

SEQ ID NO: 40894 - DNA, 41 bp, Emericella nidulans
gaattcactgcggccgccatgctacgcgtacagcaacatcg

SEQ ID NO: 40895 - DNA, 42 bp, Emericella nidulans
gttctcgagacgagcgatcgcgtctcggtatccaatcggtca

SEQ ID NO: 40896 - DNA, 41 bp, Emericella nidulans
gaattcactgcggccgccatgggcgtcccctgcgaaaactg

SEQ ID NO: 40897 - DNA, 40 bp, Emericella nidulans
gttctcgagacgagcgatcgcagcgcctcgtccgctcgtt

SEQ ID NO: 40898 - DNA, 49 bp, Emericella nidulans
gaattcactgcggccgccatggcaaccctagaagcaaatctccttttcc

SEQ ID NO: 40899 - DNA, 42 bp, Emericella nidulans
gttctcgagacgagcgatcgctgcctggcgcaacttctagcc

SEQ ID NO: 40900 - DNA, 41 bp, Emericella nidulans
gaattcactgcggccgccatgacggttcatcgtttcagacc

SEQ ID NO: 40901 - DNA, 43 bp, Emericella nidulans
gttctcgagacgagcgatcgcgactactgaaaacccaccaagc

SEQ ID NO: 40902 - DNA, 41 bp, Emericella nidulans
gaattcactgcggccgccatggccagcaccagcaccagcac

SEQ ID NO: 40903 - DNA, 41 bp, Emericella nidulans
gttctcgagacgagcgatcgccaatgcgcgtttccgcacaa

SEQ ID NO: 40904 - DNA, 43 bp, Emericella nidulans
gaattcactgcggccgccatggcggagatggtacgaggtacgg

SEQ ID NO: 40905 - DNA, 47 bp, Emericella nidulans
gttctcgagacgagcgatcgcgtaggccccattcgacagctttctgg

SEQ ID NO: 40906 - DNA, 49 bp, Emericella nidulans
gaattcactgcggccgccatgtatcaagacggtacgtcgtctattctca

SEQ ID NO: 40907 - DNA, 41 bp, Emericella nidulans
gttctcgagacgagcgatcgcgcaccatcgccaggcactca

SEQ ID NO: 40908 - DNA, 49 bp, Emericella nidulans
gaattcactgcggccgccatgtgctgagattagtctactcgctcctcca

SEQ ID NO: 40909 - DNA, 45 bp, Emericella nidulans
gttctcgagacgagcgatcgcgcaattgttggctttcgcgttttg

SEQ ID NO: 40910 - DNA, 42 bp, Emericella nidulans
gaattcactgcggccgccatgtctgcgtcgcgacttttgcag

SEQ ID NO: 40911 - DNA, 48 bp, Emericella nidulans
gttctcgagacgagcgatcgccctaaagacgatgaagcaagggcgaca

SEQ ID NO: 40912 - DNA, 42 bp, Emericella nidulans
gaattcactgcggccgccatgggccgagaaattcgaggacga

SEQ ID NO: 40913 - DNA, 49 bp, Emericella nidulans
gttctcgagacgagcgatcgcctcatcaaagcctataagatccggcatt

SEQ ID NO: 40914 - DNA, 47 bp, Emericella nidulans
gaattcactgcggccgccatgcacaatccagttcggactcagactca

SEQ ID NO: 40915 - DNA, 41 bp, Emericella nidulans
gttctcgagacgagcgatcgccgcattccacacccgcacat

SEQ ID NO: 40916 - DNA, 44 bp, Emericella nidulans
gaattcactgcggccgccatggcacttggtcgacatccccactc

SEQ ID NO: 40917 - DNA, 49 bp, Emericella nidulans
gttctcgagacgagcgatcgccgaccatggaacagaaaacgtacaaacc

SEQ ID NO: 40918 - DNA, 44 bp, Emericella nidulans
gaattcactgcggccgccatgtcagcatacgacatttccgagcc

SEQ ID NO: 40919 - DNA, 41 bp, Emericella nidulans
gttctcgagacgagcgatcgcgggcccatatcccgcttgct

SEQ ID NO: 40920 - DNA, 41 bp, Emericella nidulans
gaattcactgcggccgccatgtccgccgtcacgatcaccag

SEQ ID NO: 40921 - DNA, 41 bp, Emericella nidulans
gttctcgagacgagcgatcgctgcatgtgggcagggaggtg

SEQ ID NO: 40922 - DNA, 41 bp, Emericella nidulans
gaattcactgcggccgccatgtatgttctgccctccctttg

SEQ ID NO: 40923 - DNA, 41 bp, Emericella nidulans
gttctcgagacgagcgatcgcgctagggtgactcgcatctc

SEQ ID NO: 40924 - DNA, 49 bp, Emericella nidulans
gaattcactgcggccgccatggacagtctaatccgcaagctatttggaa

SEQ ID NO: 40925 - DNA, 44 bp, Emericella nidulans
gttctcgagacgagcgatcgcatgtatgttgaagggagcgtgcc

SEQ ID NO: 40926 - DNA, 41 bp, Emericella nidulans
gaattcactgcggccgccatgtatcatggcgccacgggacc

SEQ ID NO: 40927 - DNA, 45 bp, Emericella nidulans
gttctcgagacgagcgatcgctactcaggccttggcctcttcacg

SEQ ID NO: 40928 - DNA, 43 bp, Emericella nidulans
gaattcactgcggccgccatgtggtggtgctgacaccagtgga

SEQ ID NO: 40929 - DNA, 41 bp, Emericella nidulans
gttctcgagacgagcgatcgcgaacgtgcggcaagttccag

SEQ ID NO: 40930 - DNA, 41 bp, Emericella nidulans
gaattcactgcggccgccatgcacagatgcggtcacatttt

SEQ ID NO: 40931 - DNA, 40 bp, Emericella nidulans
gttctcgagacgagcgatcgcacccgctggtcaacagtct

SEQ ID NO: 40932 - DNA, 49 bp, Emericella nidulans
gaattcactgcggccgccatgttggtggaaggaagcatataactacgtc

SEQ ID NO: 40933 - DNA, 45 bp, Emericella nidulans
gttctcgagacgagcgatcgcctccgtcaacacagtcaagcacga

SEQ ID NO: 40934 - DNA, 41 bp, Emericella nidulans
gaattcactgcggccgccatggcgcggtcggctcagtttca

SEQ ID NO: 40935 - DNA, 43 bp, Emericella nidulans
gttctcgagacgagcgatcgcgcaataaggcgggagtcgtggg

SEQ ID NO: 40936 - DNA, 41 bp, Emericella nidulans
gaattcactgcggccgccatgcccgtcaggtcggccttcaa

SEQ ID NO: 40937 - DNA, 49 bp, Emericella nidulans
gttctcgagacgagcgatcgcgggctgaaaactgctagacatgcgtccc

SEQ ID NO: 40938 - DNA, 47 bp, Emericella nidulans
gaattcactgcggccgccatgcttttcagcaggagaaaagcactgtc

SEQ ID NO: 40939 - DNA, 42 bp, Emericella nidulans
gttctcgagacgagcgatcgccctggcctgcgtctttgttcg

SEQ ID NO: 40940 - DNA, 47 bp, Emericella nidulans
gaattcactgcggccgccatgttggggtgtctcctttttctaactca

SEQ ID NO: 40941 - DNA, 46 bp, Emericella nidulans
gttctcgagacgagcgatcgcattggaatggtgcttgtgctggttg

SEQ ID NO: 40942 - DNA, 46 bp, Emericella nidulans
gaattcactgcggccgccatggaggatccaagttgacgcagccaga

SEQ ID NO: 40943 - DNA, 41 bp, Emericella nidulans
gttctcgagacgagcgatcgccataccgaaaccccgggtgc

SEQ ID NO: 40944 - DNA, 41 bp, Emericella nidulans
gaattcactgcggccgccatggacgaccggaaccacctccc

SEQ ID NO: 40945 - DNA, 45 bp, Emericella nidulans
gttctcgagacgagcgatcgctcgccctttccttgttttgtctga

SEQ ID NO: 40946 - DNA, 46 bp, Emericella nidulans
gaattcactgcggccgccatgtcagcaacaagaaggacatcaatgc

SEQ ID NO: 40947 - DNA, 49 bp, Emericella nidulans
gttctcgagacgagcgatcgctccagagagcttcaggatctggggcaac

SEQ ID NO: 40948 - DNA, 41 bp, Emericella nidulans
gaattcactgcggccgccatgatgccctgattgcctgtatc

SEQ ID NO: 40949 - DNA, 41 bp, Emericella nidulans
gttctcgagacgagcgatcgcctggtatccgttccttcgtc

SEQ ID NO: 40950 - DNA, 41 bp, Emericella nidulans
gaattcactgcggccgccatgggggtggaagaggatgtacc

SEQ ID NO: 40951 - DNA, 42 bp, Emericella nidulans
gttctcgagacgagcgatcgcttccttcttttgacgcaaagt

SEQ ID NO: 40952 - DNA, 46 bp, Emericella nidulans
gaattcactgcggccgccatgcggaggaaattacccgtgtatccag

SEQ ID NO: 40953 - DNA, 49 bp, Emericella nidulans
gttctcgagacgagcgatcgcggacactgaaacgcagctgtccgtggta

SEQ ID NO: 40954 - DNA, 44 bp, Emericella nidulans
gaattcactgcggccgccatgcatctggaaacacaaccgcctta

SEQ ID NO: 40955 - DNA, 45 bp, Emericella nidulans
gttctcgagacgagcgatcgcctgatggttccacgaggcgacttc

SEQ ID NO: 40956 - DNA, 43 bp, Emericella nidulans
gaattcactgcggccgccatggcagaagattctccatcgatac

SEQ ID NO: 40957 - DNA, 40 bp, Emericella nidulans
gttctcgagacgagcgatcgcagatcgtggcagggctatc

SEQ ID NO: 40958 - DNA, 47 bp, Emericella nidulans
gaattcactgcggccgccatggctgacttacgggacaattgttgcac

SEQ ID NO: 40959 - DNA, 41 bp, Emericella nidulans
gttctcgagacgagcgatcgcgcgctagcgatgcggtcaat

SEQ ID NO: 40960 - DNA, 41 bp, Emericella nidulans
gaattcactgcggccgccatggccaacaccaacggctgcat

SEQ ID NO: 40961 - DNA, 44 bp, Emericella nidulans
gttctcgagacgagcgatcgccccaccgtgacttcgcagacaat

SEQ ID NO: 40962 - DNA, 41 bp, Emericella nidulans
gaattcactgcggccgccatgtcgcccaccgatgaccttgc

SEQ ID NO: 40963 - DNA, 49 bp, Emericella nidulans
gttctcgagacgagcgatcgcatcaggtcgaactccaccaagaatagca

SEQ ID NO: 40964 - DNA, 47 bp, Emericella nidulans
gaattcactgcggccgccatgtttccttccgagtgtcaccggcaaat

SEQ ID NO: 40965 - DNA, 47 bp, Emericella nidulans
gttctcgagacgagcgatcgctttcttctcaatcagcgacacaatgg

SEQ ID NO: 40966 - DNA, 44 bp, Emericella nidulans
gaattcactgcggccgccatggcccctagtgataacgcgcagca

SEQ ID NO: 40967 - DNA, 44 bp, Emericella nidulans
gttctcgagacgagcgatcgctggcagtctgctccaacgattcc

SEQ ID NO: 40968 - DNA, 39 bp, Emericella nidulans
gaattcactgcggccgccatgagctgggctccgcaaacg

SEQ ID NO: 40969 - DNA, 41 bp, Emericella nidulans
gttctcgagacgagcgatcgcgacatctggctgggcgaggg

SEQ ID NO: 40970 - DNA, 42 bp, Emericella nidulans
gaattcactgcggccgccatggtaaggttggcatccattgtg

SEQ ID NO: 40971 - DNA, 41 bp, Emericella nidulans
gttctcgagacgagcgatcgccctgggggtgcataataaca

SEQ ID NO: 40972 - DNA, 40 bp, Emericella nidulans
gaattcactgcggccgccatgcgaggacccgggtattttt

SEQ ID NO: 40973 - DNA, 41 bp, Emericella nidulans
gttctcgagacgagcgatcgccactacatcgcagtcgccta

SEQ ID NO: 40974 - DNA, 43 bp, Emericella nidulans
gaattcactgcggccgccatgggtcctagcgttcccagcagca

SEQ ID NO: 40975 - DNA, 44 bp, Emericella nidulans
gttctcgagacgagcgatcgctgccaacggtcttggtgacagtg

SEQ ID NO: 40976 - DNA, 42 bp, Emericella nidulans
gaattcactgcggccgccatgtctgatctccgaaaccaggat

SEQ ID NO: 40977 - DNA, 41 bp, Emericella nidulans
gttctcgagacgagcgatcgctaccggcgaatttaatgacc

SEQ ID NO: 40978 - DNA, 41 bp, Emericella nidulans
gaattcactgcggccgccatgcggccggtgcagcagacatt

SEQ ID NO: 40979 - DNA, 43 bp, Emericella nidulans
gttctcgagacgagcgatcgcaatctgcggcatttgttcttgc

SEQ ID NO: 40980 - DNA, 48 bp, Emericella nidulans
gaattcactgcggccgccatggcgagttgttcctcctttcagttcttg

SEQ ID NO: 40981 - DNA, 49 bp, Emericella nidulans
gttctcgagacgagcgatcgcacttcatttagcgtctagttgtcggtgc

SEQ ID NO: 40982 - DNA, 42 bp, Emericella nidulans
gaattcactgcggccgccatgcaaagaccccaagactgtgaa

SEQ ID NO: 40983 - DNA, 41 bp, Emericella nidulans
gttctcgagacgagcgatcgcatttgctgttgcatctgctg

SEQ ID NO: 40984 - DNA, 49 bp, Emericella nidulans
gaattcactgcggccgccatgcagatgataaaaccgaaagcatctatgg

SEQ ID NO: 40985 - DNA, 49 bp, Emericella nidulans
gttctcgagacgagcgatcgcacatttagtccgcctccttaatacaagc

SEQ ID NO: 40986 - DNA, 41 bp, Emericella nidulans
gaattcactgcggccgccatgcaaatgtagcttgggaccgt

SEQ ID NO: 40987 - DNA, 41 bp, Emericella nidulans
gttctcgagacgagcgatcgccgccttgatggtaacggata

SEQ ID NO: 40988 - DNA, 49 bp, Emericella nidulans
gaattcactgcggccgccatgtgtctcgtcttctataactggggctatg

SEQ ID NO: 40989 - DNA, 45 bp, Emericella nidulans
gttctcgagacgagcgatcgcgcgcttttgacgaccaactaaccc

SEQ ID NO: 40990 - DNA, 45 bp, Emericella nidulans
gaattcactgcggccgccatgcaatcagattgaccagccgtcaca

SEQ ID NO: 40991 - DNA, 48 bp, Emericella nidulans
gttctcgagacgagcgatcgcctggattttcaagttcctcagtgttga

SEQ ID NO: 40992 - DNA, 45 bp, Emericella nidulans
gaattcactgcggccgccatgcacggcaatggagagtctgaacga

SEQ ID NO: 40993 - DNA, 43 bp, Emericella nidulans
gttctcgagacgagcgatcgccccccgatccaggtacacgaca

SEQ ID NO: 40994 - DNA, 48 bp, Emericella nidulans
gaattcactgcggccgccatgaggctggggtatgtgagtatgcccttc

SEQ ID NO: 40995 - DNA, 46 bp, Emericella nidulans
gttctcgagacgagcgatcgcaaaggttcatgatgtcgagagtgcc

SEQ ID NO: 40996 - DNA, 49 bp, Emericella nidulans
gaattcactgcggccgccatgcgttattatggatgaagccgatcgtatg

SEQ ID NO: 40997 - DNA, 41 bp, Emericella nidulans
gttctcgagacgagcgatcgcctccgcgtgtgggcttcgat

SEQ ID NO: 40998 - DNA, 44 bp, Emericella nidulans
gaattcactgcggccgccatggcccttagaaatggtatttatcg

SEQ ID NO: 40999 - DNA, 41 bp, Emericella nidulans
gttctcgagacgagcgatcgctccaagccttgcgaaattag

SEQ ID NO: 41000 - DNA, 43 bp, Emericella nidulans
gaattcactgcggccgccatgcgactaccagactgacttccag

SEQ ID NO: 41001 - DNA, 41 bp, Emericella nidulans
gttctcgagacgagcgatcgccaaggacgttagggaagacg

SEQ ID NO: 41002 - DNA, 45 bp, Emericella nidulans
gaattcactgcggccgccatgcgctcctgctaagacgttcggtcc

SEQ ID NO: 41003 - DNA, 41 bp, Emericella nidulans
gttctcgagacgagcgatcgcgcggcacacgacgggttctt

SEQ ID NO: 41004 - DNA, 41 bp, Emericella nidulans
gaattcactgcggccgccatgaagcgggctgctctgcatca

SEQ ID NO: 41005 - DNA, 49 bp, Emericella nidulans
gttctcgagacgagcgatcgctctgagcagtttcctaagagtgcccatt

SEQ ID NO: 41006 - DNA, 41 bp, Emericella nidulans
gaattcactgcggccgccatgggcgtggccgctctgaagtt

SEQ ID NO: 41007 - DNA, 44 bp, Emericella nidulans
gttctcgagacgagcgatcgcctggatagcattcgcgatcttcg

SEQ ID NO: 41008 - DNA, 42 bp, Emericella nidulans
gaattcactgcggccgccatggaggtcggggaatgacaacca

SEQ ID NO: 41009 - DNA, 41 bp, Emericella nidulans
gttctcgagacgagcgatcgccaggcggtgggggaaggaag

SEQ ID NO: 41010 - DNA, 49 bp, Emericella nidulans
gaattcactgcggccgccatgctcggtatatatctgtccttcccccatc

SEQ ID NO: 41011 - DNA, 49 bp, Emericella nidulans
gttctcgagacgagcgatcgctcaagtttaataaagttcaggccgtgct

SEQ ID NO: 41012 - DNA, 41 bp, Emericella nidulans
gaattcactgcggccgccatgggctttgctatggggcttat

SEQ ID NO: 41013 - DNA, 41 bp, Emericella nidulans
gttctcgagacgagcgatcgcgcaacttcaaagccttttcg

SEQ ID NO: 41014 - DNA, 45 bp, Emericella nidulans
gaattcactgcggccgccatggccacaccctcatcagcctatttc

SEQ ID NO: 41015 - DNA, 48 bp, Emericella nidulans
gttctcgagacgagcgatcgccacaaagatcgcttggacggacggatt

SEQ ID NO: 41016 - DNA, 46 bp, Emericella nidulans
gaattcactgcggccgccatgcgctccattacatcctttgcccaac

SEQ ID NO: 41017 - DNA, 45 bp, Emericella nidulans
gttctcgagacgagcgatcgccttggtagatgctggttggtttcg

SEQ ID NO: 41018 - DNA, 47 bp, Emericella nidulans
gaattcactgcggccgccatgtcacttcgtctttcgacgagatcctg

SEQ ID NO: 41019 - DNA, 49 bp, Emericella nidulans
gttctcgagacgagcgatcgcttgagactgagtacattgaacgtcttcg

SEQ ID NO: 41020 - DNA, 46 bp, Emericella nidulans
gaattcactgcggccgccatgaggcattcatccccaaactgtggaa

SEQ ID NO: 41021 - DNA, 49 bp, Emericella nidulans
gttctcgagacgagcgatcgccacggagatagaatctgcggcggagaga

SEQ ID NO: 41022 - DNA, 46 bp, Emericella nidulans
gaattcactgcggccgccatgggagacgctctcaagtttggcattc

SEQ ID NO: 41023 - DNA, 48 bp, Emericella nidulans
gttctcgagacgagcgatcgccgtacttgaagcctctccgatagcacc

SEQ ID NO: 41024 - DNA, 41 bp, Emericella nidulans
gaattcactgcggccgccatgcgaaaccgccgggaaagcat

SEQ ID NO: 41025 - DNA, 46 bp, Emericella nidulans
gttctcgagacgagcgatcgccgccgccataattctataggctagg

SEQ ID NO: 41026 - DNA, 45 bp, Emericella nidulans
gaattcactgcggccgccatgcaggaggaaatattcgggcccctc

SEQ ID NO: 41027 - DNA, 49 bp, Emericella nidulans
gttctcgagacgagcgatcgccttcaatagccacatctttgccggcttc

SEQ ID NO: 41028 - DNA, 45 bp, Emericella nidulans
gaattcactgcggccgccatgatggcattcggaacgatctacagc

SEQ ID NO: 41029 - DNA, 49 bp, Emericella nidulans
gttctcgagacgagcgatcgcctccctcttttcaatgaactttgtctca

SEQ ID NO: 41030 - DNA, 45 bp, Emericella nidulans
gaattcactgcggccgccatgttatgaagagccgaccgaggagga

SEQ ID NO: 41031 - DNA, 47 bp, Emericella nidulans
gttctcgagacgagcgatcgcccgatattgatgagcaggtagaacca

SEQ ID NO: 41032 - DNA, 41 bp, Emericella nidulans
gaattcactgcggccgccatgacataaggttcgctcgcatc

SEQ ID NO: 41033 - DNA, 42 bp, Emericella nidulans
gttctcgagacgagcgatcgcggtggctcttgtttcactgat

SEQ ID NO: 41034 - DNA, 49 bp, Emericella nidulans
gaattcactgcggccgccatgtctgagttgattgatgaaatagggatcg

SEQ ID NO: 41035 - DNA, 41 bp, Emericella nidulans
gttctcgagacgagcgatcgccccgtcccattctccgaacg

SEQ ID NO: 41036 - DNA, 46 bp, Emericella nidulans
gaattcactgcggccgccatgaaagatcatgtctcactcgctcagg

SEQ ID NO: 41037 - DNA, 49 bp, Emericella nidulans
gttctcgagacgagcgatcgcactggggatctagataccatgtcgctgt

SEQ ID NO: 41038 - DNA, 45 bp, Emericella nidulans
gaattcactgcggccgccatggtgaaagaaagcagggcttcactg

SEQ ID NO: 41039 - DNA, 42 bp, Emericella nidulans
gttctcgagacgagcgatcgcctcgtgagccgtcggaaaatg

SEQ ID NO: 41040 - DNA, 43 bp, Emericella nidulans
gaattcactgcggccgccatgaacaagaggagcctcgattatg

SEQ ID NO: 41041 - DNA, 41 bp, Emericella nidulans
gttctcgagacgagcgatcgccgcgaagacttcttggtctc

SEQ ID NO: 41042 - DNA, 41 bp, Emericella nidulans
gaattcactgcggccgccatgctcgcgagcaatcctatcat

SEQ ID NO: 41043 - DNA, 41 bp, Emericella nidulans
gttctcgagacgagcgatcgcctgaggtacgcggctctatc

SEQ ID NO: 41044 - DNA, 42 bp, Emericella nidulans
gaattcactgcggccgccatggtcttccacagcggagcctga

SEQ ID NO: 41045 - DNA, 49 bp, Emericella nidulans
gttctcgagacgagcgatcgcttctggtagttcgcttgaaggagacctg

SEQ ID NO: 41046 - DNA, 42 bp, Emericella nidulans
gaattcactgcggccgccatgcgagtgggtcgagctccctga

SEQ ID NO: 41047 - DNA, 44 bp, Emericella nidulans
gttctcgagacgagcgatcgcgaggttcttgacggctccgtgct

SEQ ID NO: 41048 - DNA, 47 bp, Emericella nidulans
gaattcactgcggccgccatgtcatttatgacctggttgatcactgg

SEQ ID NO: 41049 - DNA, 41 bp, Emericella nidulans
gttctcgagacgagcgatcgcgcactcggctcgcaaagggt

SEQ ID NO: 41050 - DNA, 41 bp, Emericella nidulans
gaattcactgcggccgccatgcaccgtaggcccctcgctca

SEQ ID NO: 41051 - DNA, 44 bp, Emericella nidulans
gttctcgagacgagcgatcgccggactccgaggccaattctttc

SEQ ID NO: 41052 - DNA, 41 bp, Emericella nidulans
gaattcactgcggccgccatggcgttcctgagtcaactcct

SEQ ID NO: 41053 - DNA, 41 bp, Emericella nidulans
gttctcgagacgagcgatcgcggctcgatgataatgctggt

SEQ ID NO: 41054 - DNA, 41 bp, Emericella nidulans
gaattcactgcggccgccatgagaccgcggctacgccgaac

SEQ ID NO: 41055 - DNA, 41 bp, Emericella nidulans
gttctcgagacgagcgatcgccgccttgagcggcgagagaa

SEQ ID NO: 41056 - DNA, 43 bp, Emericella nidulans
gaattcactgcggccgccatggctcgtagctgccatccccaac

SEQ ID NO: 41057 - DNA, 41 bp, Emericella nidulans
gttctcgagacgagcgatcgcaactcctcccaccgcgcatc

SEQ ID NO: 41058 - DNA, 47 bp, Emericella nidulans
gaattcactgcggccgccatgatcttgatctgagctgaaatatatgg

SEQ ID NO: 41059 - DNA, 41 bp, Emericella nidulans
gttctcgagacgagcgatcgcaacccttctggcatcttcta

SEQ ID NO: 41060 - DNA, 41 bp, Emericella nidulans
gaattcactgcggccgccatggcgctctccaggctggtgct

SEQ ID NO: 41061 - DNA, 41 bp, Emericella nidulans
gttctcgagacgagcgatcgccgcgccgaggaagagagcag

SEQ ID NO: 41062 - DNA, 41 bp, Emericella nidulans
gaattcactgcggccgccatggactcagcgaagacgtccag

SEQ ID NO: 41063 - DNA, 44 bp, Emericella nidulans
gttctcgagacgagcgatcgccagttgatgattttggagacttg

SEQ ID NO: 41064 - DNA, 49 bp, Emericella nidulans
gaattcactgcggccgccatgagtcttgtcggactgtccgccgatcttc

SEQ ID NO: 41065 - DNA, 49 bp, Emericella nidulans
gttctcgagacgagcgatcgccacaagtcacattgaccgtgagagtctg

SEQ ID NO: 41066 - DNA, 48 bp, Emericella nidulans
gaattcactgcggccgccatgtcaatctggtgggaatcttagccattg

SEQ ID NO: 41067 - DNA, 41 bp, Emericella nidulans
gttctcgagacgagcgatcgcagcgctcagcagcgtcgtga

SEQ ID NO: 41068 - DNA, 49 bp, Emericella nidulans
gaattcactgcggccgccatgtcttgtgcattacgactatgagaaagca

SEQ ID NO: 41069 - DNA, 48 bp, Emericella nidulans
gttctcgagacgagcgatcgcatcaagctggacatagttcgccggaaa

SEQ ID NO: 41070 - DNA, 41 bp, Emericella nidulans
gaattcactgcggccgccatgttgcttggccctaactatcg

SEQ ID NO: 41071 - DNA, 41 bp, Emericella nidulans
gttctcgagacgagcgatcgcgctaatatccgagcaacggt

SEQ ID NO: 41072 - DNA, 43 bp, Emericella nidulans
gaattcactgcggccgccatgccatcaccacgtctatcccaca

SEQ ID NO: 41073 - DNA, 43 bp, Emericella nidulans
gttctcgagacgagcgatcgcgggacgtagcggtcgatgtcca

SEQ ID NO: 41074 - DNA, 44 bp, Emericella nidulans
gaattcactgcggccgccatgccagctgtggcgataccttctcg

SEQ ID NO: 41075 - DNA, 49 bp, Emericella nidulans
gttctcgagacgagcgatcgccagtcagcaatagtagtacgaccgaggc

SEQ ID NO: 41076 - DNA, 45 bp, Emericella nidulans
gaattcactgcggccgccatgctactaccataccagggagatagg

SEQ ID NO: 41077 - DNA, 42 bp, Emericella nidulans
gttctcgagacgagcgatcgcgggatgaacctggtagaagtt

SEQ ID NO: 41078 - DNA, 42 bp, Emericella nidulans
gaattcactgcggccgccatgtcaccggctccttgacatccc

SEQ ID NO: 41079 - DNA, 49 bp, Emericella nidulans
gttctcgagacgagcgatcgccatcaactaacccacatcataccagagc

SEQ ID NO: 41080 - DNA, 41 bp, Emericella nidulans
gaattcactgcggccgccatgtcaatgcaacggataacagg

SEQ ID NO: 41081 - DNA, 41 bp, Emericella nidulans
gttctcgagacgagcgatcgctcgagcaaacactcaaccac

SEQ ID NO: 41082 - DNA, 49 bp, Emericella nidulans
gaattcactgcggccgccatgctacggtcactgacgaacagccggactc

SEQ ID NO: 41083 - DNA, 48 bp, Emericella nidulans
gttctcgagacgagcgatcgcgcagctcttcgtatttcccgagctcat

SEQ ID NO: 41084 - DNA, 47 bp, Emericella nidulans
gaattcactgcggccgccatgcagtcgacatttgtataactacaacc

SEQ ID NO: 41085 - DNA, 42 bp, Emericella nidulans
gttctcgagacgagcgatcgctctgagagggccttaaatgct

SEQ ID NO: 41086 - DNA, 41 bp, Emericella nidulans
gaattcactgcggccgccatgactgcagcgcctccactccc

SEQ ID NO: 41087 - DNA, 40 bp, Emericella nidulans
gttctcgagacgagcgatcgcgccgtcattgctcccaagg

SEQ ID NO: 41088 - DNA, 43 bp, Emericella nidulans
gaattcactgcggccgccatgcgagaaggcattgacgcgaacc

SEQ ID NO: 41089 - DNA, 41 bp, Emericella nidulans
gttctcgagacgagcgatcgctgggctgctcggacacacct

SEQ ID NO: 41090 - DNA, 48 bp, Emericella nidulans
gaattcactgcggccgccatgaccacgttcgaatacactggtcaatcc

SEQ ID NO: 41091 - DNA, 49 bp, Emericella nidulans
gttctcgagacgagcgatcgctttgcgactactctggctttaggtaaga

SEQ ID NO: 41092 - DNA, 48 bp, Emericella nidulans
gaattcactgcggccgccatggcgggttatcactacgttctctttgga

SEQ ID NO: 41093 - DNA, 41 bp, Emericella nidulans
gttctcgagacgagcgatcgccccctgcccttttccgcaag

SEQ ID NO: 41094 - DNA, 41 bp, Emericella nidulans
gaattcactgcggccgccatgaactggggctctgcatacac

SEQ ID NO: 41095 - DNA, 39 bp, Emericella nidulans
gttctcgagacgagcgatcgcgatgctgaggccgagaag

SEQ ID NO: 41096 - DNA, 42 bp, Emericella nidulans
gaattcactgcggccgccatgcaaaccgcaacctttgcccac

SEQ ID NO: 41097 - DNA, 44 bp, Emericella nidulans
gttctcgagacgagcgatcgctaccgcctcctcaacaactaccc

SEQ ID NO: 41098 - DNA, 42 bp, Emericella nidulans
gaattcactgcggccgccatgcccgcgggtgatatcagcata

SEQ ID NO: 41099 - DNA, 45 bp, Emericella nidulans
gttctcgagacgagcgatcgcatccatgcttcgagaagggattcg

SEQ ID NO: 41100 - DNA, 40 bp, Emericella nidulans
gaattcactgcggccgccatgcggggatcgtatgtcacag

SEQ ID NO: 41101 - DNA, 48 bp, Emericella nidulans
gttctcgagacgagcgatcgctgcataggtaattatacaagttctcca

SEQ ID NO: 41102 - DNA, 47 bp, Emericella nidulans
gaattcactgcggccgccatggcggataaggaccttgtgaaattgct

SEQ ID NO: 41103 - DNA, 42 bp, Emericella nidulans
gttctcgagacgagcgatcgcggcttgcacgccgacgtagag

SEQ ID NO: 41104 - DNA, 47 bp, Emericella nidulans
gaattcactgcggccgccatgttgtgacttctataccaatcttgacg

SEQ ID NO: 41105 - DNA, 41 bp, Emericella nidulans
gttctcgagacgagcgatcgcggaaagctgaggattcgaga

SEQ ID NO: 41106 - DNA, 47 bp, Emericella nidulans
gaattcactgcggccgccatggctcaacaatccacttcagcaaagca

SEQ ID NO: 41107 - DNA, 41 bp, Emericella nidulans
gttctcgagacgagcgatcgcacaactgcgcccgagcctga

SEQ ID NO: 41108 - DNA, 42 bp, Emericella nidulans
gaattcactgcggccgccatgcccttcgctcgtcggatccat

SEQ ID NO: 41109 - DNA, 44 bp, Emericella nidulans
gttctcgagacgagcgatcgccctcgtttatcagggcattacgg

SEQ ID NO: 41110 - DNA, 41 bp, Emericella nidulans
gaattcactgcggccgccatgggggcgcgtgacccttatcc

SEQ ID NO: 41111 - DNA, 49 bp, Emericella nidulans
gttctcgagacgagcgatcgcagctggtacttgagaaaagtagcaacga

SEQ ID NO: 41112 - DNA, 45 bp, Emericella nidulans
gaattcactgcggccgccatgcccccttcttcaccttctccgaca

SEQ ID NO: 41113 - DNA, 46 bp, Emericella nidulans
gttctcgagacgagcgatcgccatgttttcatctgcggcaattgtg

SEQ ID NO: 41114 - DNA, 48 bp, Emericella nidulans
gaattcactgcggccgccatgcaacgtccctcttgaaatccttactct

SEQ ID NO: 41115 - DNA, 43 bp, Emericella nidulans
gttctcgagacgagcgatcgcagaacgccattcgctgaacacg

SEQ ID NO: 41116 - DNA, 49 bp, Emericella nidulans
gaattcactgcggccgccatgttacttcatgacgaatcttcgacgcaca

SEQ ID NO: 41117 - DNA, 47 bp, Emericella nidulans
gttctcgagacgagcgatcgcgtagcacacatcctgccagtgaaaga

SEQ ID NO: 41118 - DNA, 48 bp, Emericella nidulans
gaattcactgcggccgccatgggaacttagattcccatcagctcgtga

SEQ ID NO: 41119 - DNA, 41 bp, Emericella nidulans
gttctcgagacgagcgatcgctgcgtacaaagcggcgagga

SEQ ID NO: 41120 - DNA, 41 bp, Emericella nidulans
gaattcactgcggccgccatgttctgtcccggtatctccac

SEQ ID NO: 41121 - DNA, 41 bp, Emericella nidulans
gttctcgagacgagcgatcgcatcccctggcatagggtatc

SEQ ID NO: 41122 - DNA, 41 bp, Emericella nidulans
gaattcactgcggccgccatgcgttgtcgggactccatact

SEQ ID NO: 41123 - DNA, 42 bp, Emericella nidulans
gttctcgagacgagcgatcgcaagcattccaccaaaattgtc

SEQ ID NO: 41124 - DNA, 48 bp, Emericella nidulans
gaattcactgcggccgccatgcggatatttgatcttctatcaccagca

SEQ ID NO: 41125 - DNA, 49 bp, Emericella nidulans
gttctcgagacgagcgatcgctaaggaaccatagcagtcttatccgtgt

SEQ ID NO: 41126 - DNA, 48 bp, Emericella nidulans
gaattcactgcggccgccatgtctggttcgtgcagttcctacttgtcc

SEQ ID NO: 41127 - DNA, 47 bp, Emericella nidulans
gttctcgagacgagcgatcgcgtggtatcactctgggagcaggcagt

SEQ ID NO: 41128 - DNA, 41 bp, Emericella nidulans
gaattcactgcggccgccatgcacctggattgggtgaaaag

SEQ ID NO: 41129 - DNA, 41 bp, Emericella nidulans
gttctcgagacgagcgatcgcctgagctgtcatggagttcg

SEQ ID NO: 41130 - DNA, 47 bp, Emericella nidulans
gaattcactgcggccgccatgcagaaccgactaagagaactggagca

SEQ ID NO: 41131 - DNA, 41 bp, Emericella nidulans
gttctcgagacgagcgatcgccgccggtagtgcccaactga

SEQ ID NO: 41132 - DNA, 45 bp, Emericella nidulans
gaattcactgcggccgccatgacttcaaaaatggcgtcgaaacct

SEQ ID NO: 41133 - DNA, 41 bp, Emericella nidulans
gttctcgagacgagcgatcgcgccaccagcaccgccgtatc

SEQ ID NO: 41134 - DNA, 41 bp, Emericella nidulans
gaattcactgcggccgccatggtcaccgggtcttgatccta

SEQ ID NO: 41135 - DNA, 43 bp, Emericella nidulans
gttctcgagacgagcgatcgcgaacaccttgactactccatcg

SEQ ID NO: 41136 - DNA, 42 bp, Emericella nidulans
gaattcactgcggccgccatggcaagcctatctccacgtact

SEQ ID NO: 41137 - DNA, 40 bp, Emericella nidulans
gttctcgagacgagcgatcgcaggcgcagatcagtccaat

SEQ ID NO: 41138 - DNA, 49 bp, Emericella nidulans
gaattcactgcggccgccatgtgacttcagttggcaagagtagcccatc

SEQ ID NO: 41139 - DNA, 45 bp, Emericella nidulans
gttctcgagacgagcgatcgctgaacctagcgaattcgtcgcaga

SEQ ID NO: 41140 - DNA, 48 bp, Emericella nidulans
gaattcactgcggccgccatgcccctcgtttggcttataactggaaca

SEQ ID NO: 41141 - DNA, 42 bp, Emericella nidulans
gttctcgagacgagcgatcgctggcctggttcgacaaggagg

SEQ ID NO: 41142 - DNA, 49 bp, Emericella nidulans
gaattcactgcggccgccatgaaagtgtcgcttgagcaattccgcgcta

SEQ ID NO: 41143 - DNA, 47 bp, Emericella nidulans
gttctcgagacgagcgatcgctctttcctgagtttcgagatcctttg

SEQ ID NO: 41144 - DNA, 43 bp, Emericella nidulans
gaattcactgcggccgccatgtcccggaaatgtctccagaccc

SEQ ID NO: 41145 - DNA, 46 bp, Emericella nidulans
gttctcgagacgagcgatcgcagcatctgatggacttgctgctctc

SEQ ID NO: 41146 - DNA, 48 bp, Emericella nidulans
gaattcactgcggccgccatgaacagagagaatgaacagcacagtgga

SEQ ID NO: 41147 - DNA, 45 bp, Emericella nidulans
gttctcgagacgagcgatcgcaggtcacagggtaggtcatgttgc

SEQ ID NO: 41148 - DNA, 49 bp, Emericella nidulans
gaattcactgcggccgccatggttctctaaccaagatctgcacattgct

SEQ ID NO: 41149 - DNA, 40 bp, Emericella nidulans
gttctcgagacgagcgatcgcgcattgcccgccggaacag

SEQ ID NO: 41150 - DNA, 41 bp, Emericella nidulans
gaattcactgcggccgccatgtggggtgccgagtttggtgg

SEQ ID NO: 41151 - DNA, 47 bp, Emericella nidulans
gttctcgagacgagcgatcgccgatctcttccagagtaagacgagca

SEQ ID NO: 41152 - DNA, 47 bp, Emericella nidulans
gaattcactgcggccgccatgctagtattgacaagacctctaattca

SEQ ID NO: 41153 - DNA, 41 bp, Emericella nidulans
gttctcgagacgagcgatcgcccaaaaacgcaatccaagtt

SEQ ID NO: 41154 - DNA, 46 bp, Emericella nidulans
gaattcactgcggccgccatgtgggacatcaaagaaacgccgcaag

SEQ ID NO: 41155 - DNA, 49 bp, Emericella nidulans
gttctcgagacgagcgatcgcgtgtaggttcaattacgaacacttgggt

SEQ ID NO: 41156 - DNA, 41 bp, Emericella nidulans
gaattcactgcggccgccatgccgagtttcaaacccaactg

SEQ ID NO: 41157 - DNA, 46 bp, Emericella nidulans
gttctcgagacgagcgatcgcgagaaaatgtttctagtgctgtctc

SEQ ID NO: 41158 - DNA, 48 bp, Emericella nidulans
gaattcactgcggccgccatgggtgattctaggagttgacctgatgga

SEQ ID NO: 41159 - DNA, 47 bp, Emericella nidulans
gttctcgagacgagcgatcgccgcttacaaattccatccctggatct

SEQ ID NO: 41160 - DNA, 42 bp, Emericella nidulans
gaattcactgcggccgccatgaaagacaaacctggtcagcaa

SEQ ID NO: 41161 - DNA, 41 bp, Emericella nidulans
gttctcgagacgagcgatcgctcggtgcctttgtctttctc

SEQ ID NO: 41162 - DNA, 44 bp, Emericella nidulans
gaattcactgcggccgccatggcaatattcctcggcaaagctga

SEQ ID NO: 41163 - DNA, 45 bp, Emericella nidulans
gttctcgagacgagcgatcgccccttggcaccgagctcgatagat

SEQ ID NO: 41164 - DNA, 41 bp, Emericella nidulans
gaattcactgcggccgccatgagccgctgagaccccgttca

SEQ ID NO: 41165 - DNA, 44 bp, Emericella nidulans
gttctcgagacgagcgatcgcgggtcggaactctcctcgccttc

SEQ ID NO: 41166 - DNA, 46 bp, Emericella nidulans
gaattcactgcggccgccatgacagcattatcgcggctcagaaaca

SEQ ID NO: 41167 - DNA, 41 bp, Emericella nidulans
gttctcgagacgagcgatcgcggcctcgaaggcggcaatct

SEQ ID NO: 41168 - DNA, 41 bp, Emericella nidulans
gaattcactgcggccgccatgaatctcacgcctgctctgat

SEQ ID NO: 41169 - DNA, 42 bp, Emericella nidulans
gttctcgagacgagcgatcgccgaatatagttgctggcgaat

SEQ ID NO: 41170 - DNA, 45 bp, Emericella nidulans
gaattcactgcggccgccatgagatcggcagtttcaatcccatca

SEQ ID NO: 41171 - DNA, 46 bp, Emericella nidulans
gttctcgagacgagcgatcgctcagaagaatgcgaacaatctcgac

SEQ ID NO: 41172 - DNA, 48 bp, Emericella nidulans
gaattcactgcggccgccatgacctacctcccgttgaccatcacttca

SEQ ID NO: 41173 - DNA, 42 bp, Emericella nidulans
gttctcgagacgagcgatcgccctcaaggccacggatgggat

SEQ ID NO: 41174 - DNA, 45 bp, Emericella nidulans
gaattcactgcggccgccatgcaaattaaagacaggatagctcgt

SEQ ID NO: 41175 - DNA, 40 bp, Emericella nidulans
gttctcgagacgagcgatcgccgaacccgatgggtaagtc

SEQ ID NO: 41176 - DNA, 41 bp, Emericella nidulans
gaattcactgcggccgccatggggctggccgagaacgacat

SEQ ID NO: 41177 - DNA, 41 bp, Emericella nidulans
gttctcgagacgagcgatcgctgcttcgcccacctcaaccc

SEQ ID NO: 41178 - DNA, 47 bp, Emericella nidulans
gaattcactgcggccgccatggacactggtaagttgcacagcgttct

SEQ ID NO: 41179 - DNA, 41 bp, Emericella nidulans
gttctcgagacgagcgatcgcgcgcttcggctcaggggact

SEQ ID NO: 41180 - DNA, 43 bp, Emericella nidulans
gaattcactgcggccgccatgcccaactgaccattctagatcc

SEQ ID NO: 41181 - DNA, 41 bp, Emericella nidulans
gttctcgagacgagcgatcgcgcccaccagttgtctctgtc

SEQ ID NO: 41182 - DNA, 41 bp, Emericella nidulans
gaattcactgcggccgccatgaggccgtagtctttgtggac

SEQ ID NO: 41183 - DNA, 39 bp, Emericella nidulans
gttctcgagacgagcgatcgccccaggccctagtttggt

SEQ ID NO: 41184 - DNA, 49 bp, Emericella nidulans
gaattcactgcggccgccatgtgaatgttctcagaaaaacaatgaaacg

SEQ ID NO: 41185 - DNA, 44 bp, Emericella nidulans
gttctcgagacgagcgatcgctgtgcctaaagttgcagggggac

SEQ ID NO: 41186 - DNA, 44 bp, Emericella nidulans
gaattcactgcggccgccatgcgtcgagtccgtcctcacaactg

SEQ ID NO: 41187 - DNA, 44 bp, Emericella nidulans
gttctcgagacgagcgatcgcgtccatgcgcagggaaatagagg

SEQ ID NO: 41188 - DNA, 41 bp, Emericella nidulans
gaattcactgcggccgccatgagcggactggtcgctgcctc

SEQ ID NO: 41189 - DNA, 48 bp, Emericella nidulans
gttctcgagacgagcgatcgctgttctgcaaactgcaagtagctgtcg

SEQ ID NO: 41190 - DNA, 49 bp, Emericella nidulans
gaattcactgcggccgccatgcctctggataaatgtgttaagtgcgttg

SEQ ID NO: 41191 - DNA, 42 bp, Emericella nidulans
gttctcgagacgagcgatcgcggctgcgtccaagcccgttat

SEQ ID NO: 41192 - DNA, 41 bp, Emericella nidulans
gaattcactgcggccgccatggtcggcgccggattctcagg

SEQ ID NO: 41193 - DNA, 43 bp, Emericella nidulans
gttctcgagacgagcgatcgccctcaggtcccatttgccctcc

SEQ ID NO: 41194 - DNA, 47 bp, Emericella nidulans
gaattcactgcggccgccatgactctgcttttccgtgactggtccct

SEQ ID NO: 41195 - DNA, 41 bp, Emericella nidulans
gttctcgagacgagcgatcgccggccgctgttgttctgcat

SEQ ID NO: 41196 - DNA, 41 bp, Emericella nidulans
gaattcactgcggccgccatgggcggtgctaagggtggtgc

SEQ ID NO: 41197 - DNA, 48 bp, Emericella nidulans
gttctcgagacgagcgatcgctggcttttacgacgaacgattgtagat

SEQ ID NO: 41198 - DNA, 47 bp, Emericella nidulans
gaattcactgcggccgccatgcttctcacctccagggagctctgact

SEQ ID NO: 41199 - DNA, 41 bp, Emericella nidulans
gttctcgagacgagcgatcgccgcgcacgcatgtcttccat

SEQ ID NO: 41200 - DNA, 41 bp, Emericella nidulans
gaattcactgcggccgccatggcagcgtaactcctcattca

SEQ ID NO: 41201 - DNA, 41 bp, Emericella nidulans
gttctcgagacgagcgatcgcgaatcagactcgctgctgct

SEQ ID NO: 41202 - DNA, 41 bp, Emericella nidulans
gaattcactgcggccgccatgggcgtccgaaaacggtgcat

SEQ ID NO: 41203 - DNA, 46 bp, Emericella nidulans
gttctcgagacgagcgatcgctgctgtatgggtttcagaacggaga

SEQ ID NO: 41204 - DNA, 44 bp, Emericella nidulans
gaattcactgcggccgccatggtgacatttttggacgccgcaac

SEQ ID NO: 41205 - DNA, 41 bp, Emericella nidulans
gttctcgagacgagcgatcgcgagcgacgccggacatggtt

SEQ ID NO: 41206 - DNA, 42 bp, Emericella nidulans
gaattcactgcggccgccatggtgcctctccggtcgacatca

SEQ ID NO: 41207 - DNA, 41 bp, Emericella nidulans
gttctcgagacgagcgatcgcggtcggcagtggtggcaatg

SEQ ID NO: 41208 - DNA, 41 bp, Emericella nidulans
gaattcactgcggccgccatgggcggtcaaacatcaaaact

SEQ ID NO: 41209 - DNA, 41 bp, Emericella nidulans
gttctcgagacgagcgatcgcaacacagcacgttgtaccca

SEQ ID NO: 41210 - DNA, 45 bp, Emericella nidulans
gaattcactgcggccgccatgagcgttataccgagccgccttgtc

SEQ ID NO: 41211 - DNA, 42 bp, Emericella nidulans
gttctcgagacgagcgatcgctggggctcatgaaccatcacg

SEQ ID NO: 41212 - DNA, 42 bp, Emericella nidulans
gaattcactgcggccgccatgcgctcgcagctggatggattg

SEQ ID NO: 41213 - DNA, 43 bp, Emericella nidulans
gttctcgagacgagcgatcgccatccagtgtcgcgttctttca

SEQ ID NO: 41214 - DNA, 41 bp, Emericella nidulans
gaattcactgcggccgccatggtcggctacttcgcttgttc

SEQ ID NO: 41215 - DNA, 39 bp, Emericella nidulans
gttctcgagacgagcgatcgcatgcgtggtctggatggt

SEQ ID NO: 41216 - DNA, 41 bp, Emericella nidulans
gaattcactgcggccgccatgaggccactgctgccgaaacg

SEQ ID NO: 41217 - DNA, 41 bp, Emericella nidulans
gttctcgagacgagcgatcgcacagcgtccgtaggctcgaa

SEQ ID NO: 41218 - DNA, 45 bp, Emericella nidulans
gaattcactgcggccgccatgacgctctcactgcgtacctctacc

SEQ ID NO: 41219 - DNA, 43 bp, Emericella nidulans
gttctcgagacgagcgatcgcccttcgtcggtgaggccttcct

SEQ ID NO: 41220 - DNA, 42 bp, Emericella nidulans
gaattcactgcggccgccatgaccaacttggcgtccctcaga

SEQ ID NO: 41221 - DNA, 41 bp, Emericella nidulans
gttctcgagacgagcgatcgctgccggcaaatgcatcatca

SEQ ID NO: 41222 - DNA, 49 bp, Emericella nidulans
gaattcactgcggccgccatgcggaatacaagtcatccaacattgttct

SEQ ID NO: 41223 - DNA, 49 bp, Emericella nidulans
gttctcgagacgagcgatcgcccttcgataattttggctatttccttgc

SEQ ID NO: 41224 - DNA, 41 bp, Emericella nidulans
gaattcactgcggccgccatgtgagcggctggtggagttgc

SEQ ID NO: 41225 - DNA, 41 bp, Emericella nidulans
gttctcgagacgagcgatcgcatcggatgagcgcaatcagg

SEQ ID NO: 41226 - DNA, 46 bp, Emericella nidulans
gaattcactgcggccgccatggcttccatgactcgagagagaagca

SEQ ID NO: 41227 - DNA, 49 bp, Emericella nidulans
gttctcgagacgagcgatcgctgtaggtcttttcgacactcttcacaaa

SEQ ID NO: 41228 - DNA, 41 bp, Emericella nidulans
gaattcactgcggccgccatgctggatcctgcttgtctcgt

SEQ ID NO: 41229 - DNA, 41 bp, Emericella nidulans
gttctcgagacgagcgatcgcattaggtcgaatgccgtctg

SEQ ID NO: 41230 - DNA, 41 bp, Emericella nidulans
gaattcactgcggccgccatgggcaagtgccatcagcaccc

SEQ ID NO: 41231 - DNA, 43 bp, Emericella nidulans
gttctcgagacgagcgatcgcgagcgcagtagaaaagccagga

SEQ ID NO: 41232 - DNA, 44 bp, Emericella nidulans
gaattcactgcggccgccatgcctcgacgtcttcaacgttccat

SEQ ID NO: 41233 - DNA, 41 bp, Emericella nidulans
gttctcgagacgagcgatcgctgcgcgactgtcgccacttc

SEQ ID NO: 41234 - DNA, 49 bp, Emericella nidulans
gaattcactgcggccgccatgtacagcatgtcgacaacaaatgtaagca

SEQ ID NO: 41235 - DNA, 43 bp, Emericella nidulans
gttctcgagacgagcgatcgcaaggtcgtaccgctcgggcaat

SEQ ID NO: 41236 - DNA, 44 bp, Emericella nidulans
gaattcactgcggccgccatgagtggaatcccaagaagcctccc

SEQ ID NO: 41237 - DNA, 45 bp, Emericella nidulans
gttctcgagacgagcgatcgcaccgcttactcctatctgcgatgc

SEQ ID NO: 41238 - DNA, 47 bp, Emericella nidulans
gaattcactgcggccgccatgcatccgtgagaccaagattcacaagg

SEQ ID NO: 41239 - DNA, 49 bp, Emericella nidulans
gttctcgagacgagcgatcgccagtttcagcttcagcagtcttctcatc

SEQ ID NO: 41240 - DNA, 41 bp, Emericella nidulans
gaattcactgcggccgccatgcaagctgctaagtggtgcaa

SEQ ID NO: 41241 - DNA, 40 bp, Emericella nidulans
gttctcgagacgagcgatcgcctctctggcgcatgtgaat

SEQ ID NO: 41242 - DNA, 40 bp, Emericella nidulans
gaattcactgcggccgccatgctcctgcaccgaccgcacc

SEQ ID NO: 41243 - DNA, 42 bp, Emericella nidulans
gttctcgagacgagcgatcgcccacggcgactccatcgctta

SEQ ID NO: 41244 - DNA, 48 bp, Emericella nidulans
gaattcactgcggccgccatgctcatcaatctgatttcaagatgttac

SEQ ID NO: 41245 - DNA, 41 bp, Emericella nidulans
gttctcgagacgagcgatcgccttgcatctcgtctgctgct

SEQ ID NO: 41246 - DNA, 48 bp, Emericella nidulans
gaattcactgcggccgccatgctcaaggtggatattatgccagtgctc

SEQ ID NO: 41247 - DNA, 49 bp, Emericella nidulans
gttctcgagacgagcgatcgcagcaagtacggatattgctgacgataca

SEQ ID NO: 41248 - DNA, 41 bp, Emericella nidulans
gaattcactgcggccgccatggcgctcagctggacccctcc

SEQ ID NO: 41249 - DNA, 41 bp, Emericella nidulans
gttctcgagacgagcgatcgccccacacctccaggccatgc

SEQ ID NO: 41250 - DNA, 44 bp, Emericella nidulans
gaattcactgcggccgccatggcagcaagtccacgcttccgaac

SEQ ID NO: 41251 - DNA, 49 bp, Emericella nidulans
gttctcgagacgagcgatcgccccccttggaatttgcaattcctgtgct

SEQ ID NO: 41252 - DNA, 46 bp, Emericella nidulans
gaattcactgcggccgccatgtgctgtcaaatcacctccaccgatt

SEQ ID NO: 41253 - DNA, 41 bp, Emericella nidulans
gttctcgagacgagcgatcgcgcgtcgccgctgaggaaaag

SEQ ID NO: 41254 - DNA, 41 bp, Emericella nidulans
gaattcactgcggccgccatgaaccatggaatgctcctcac

SEQ ID NO: 41255 - DNA, 44 bp, Emericella nidulans
gttctcgagacgagcgatcgccctgctcactgaaagatagaaga

SEQ ID NO: 41256 - DNA, 48 bp, Emericella nidulans
gaattcactgcggccgccatgagtacgcgcagatgagatttgacttgg

SEQ ID NO: 41257 - DNA, 41 bp, Emericella nidulans
gttctcgagacgagcgatcgcaccagttccgggagcccacc

SEQ ID NO: 41258 - DNA, 40 bp, Emericella nidulans
gaattcactgcggccgccatgcgcgtcgtggctgtgttcg

SEQ ID NO: 41259 - DNA, 41 bp, Emericella nidulans
gttctcgagacgagcgatcgcgctgagcatgggcgcaacaa

SEQ ID NO: 41260 - DNA, 41 bp, Emericella nidulans
gaattcactgcggccgccatgtcctctcactcatcctgcaa

SEQ ID NO: 41261 - DNA, 43 bp, Emericella nidulans
gttctcgagacgagcgatcgctgctcttgaatagagccatgaa

SEQ ID NO: 41262 - DNA, 41 bp, Emericella nidulans
gaattcactgcggccgccatgttgcgccttgatgcgctgtc

SEQ ID NO: 41263 - DNA, 48 bp, Emericella nidulans
gttctcgagacgagcgatcgctcaacgagatcttcaggtaccaagctg

SEQ ID NO: 41264 - DNA, 41 bp, Emericella nidulans
gaattcactgcggccgccatggagccagcggtatccaaata

SEQ ID NO: 41265 - DNA, 41 bp, Emericella nidulans
gttctcgagacgagcgatcgcttcagactgaagccaggacc

SEQ ID NO: 41266 - DNA, 45 bp, Emericella nidulans
gaattcactgcggccgccatgccctttgatcatcaacggcaagga

SEQ ID NO: 41267 - DNA, 49 bp, Emericella nidulans
gttctcgagacgagcgatcgccagcacacacaattgagctgtttttacc

SEQ ID NO: 41268 - DNA, 40 bp, Emericella nidulans
gaattcactgcggccgccatgcgacgaggttacgcaaatc

SEQ ID NO: 41269 - DNA, 41 bp, Emericella nidulans
gttctcgagacgagcgatcgccaactagctctgcgtcctga

SEQ ID NO: 41270 - DNA, 49 bp, Emericella nidulans
gaattcactgcggccgccatgtttcgcgtgtagagatcaagaccgagga

SEQ ID NO: 41271 - DNA, 49 bp, Emericella nidulans
gttctcgagacgagcgatcgcatgagggtcctcctcagggccgatgtag

SEQ ID NO: 41272 - DNA, 45 bp, Emericella nidulans
gaattcactgcggccgccatgtttgcagtccatacaacgcgaatg

SEQ ID NO: 41273 - DNA, 49 bp, Emericella nidulans
gttctcgagacgagcgatcgcgagatttcaggtaaagatgatcgtgcaa

SEQ ID NO: 41274 - DNA, 41 bp, Emericella nidulans
gaattcactgcggccgccatgtcaagtgctcttgcagttcg

SEQ ID NO: 41275 - DNA, 41 bp, Emericella nidulans
gttctcgagacgagcgatcgcgtatagccggccatattgga

SEQ ID NO: 41276 - DNA, 41 bp, Emericella nidulans
gaattcactgcggccgccatgcgcagctgtttgagttcttg

SEQ ID NO: 41277 - DNA, 41 bp, Emericella nidulans
gttctcgagacgagcgatcgcgctcttgaagccaaagttgc

SEQ ID NO: 41278 - DNA, 41 bp, Emericella nidulans
gaattcactgcggccgccatgtcttcagcagcatggctcta

SEQ ID NO: 41279 - DNA, 41 bp, Emericella nidulans
gttctcgagacgagcgatcgcctgatacactgccgttgtcg

SEQ ID NO: 41280 - DNA, 41 bp, Emericella nidulans
gaattcactgcggccgccatgtcggcgtcctcggtgtatgg

SEQ ID NO: 41281 - DNA, 41 bp, Emericella nidulans
gttctcgagacgagcgatcgcatgaacccgccccagatccc

SEQ ID NO: 41282 - DNA, 41 bp, Emericella nidulans
gaattcactgcggccgccatgcgtcgacgatgtcacgtact

SEQ ID NO: 41283 - DNA, 41 bp, Emericella nidulans
gttctcgagacgagcgatcgcaagatgagccgaaaggttcc

SEQ ID NO: 41284 - DNA, 41 bp, Emericella nidulans
gaattcactgcggccgccatgggcgacggcaacggaaaatg

SEQ ID NO: 41285 - DNA, 48 bp, Emericella nidulans
gttctcgagacgagcgatcgcaatcttaattgctgctgaggcgtgctc

SEQ ID NO: 41286 - DNA, 41 bp, Emericella nidulans
gaattcactgcggccgccatgacacaagtaagccccaccaa

SEQ ID NO: 41287 - DNA, 41 bp, Emericella nidulans
gttctcgagacgagcgatcgccaaagcctcttcaacactga

SEQ ID NO: 41288 - DNA, 43 bp, Emericella nidulans
gaattcactgcggccgccatgccctcatgctggaatggcaagg

SEQ ID NO: 41289 - DNA, 48 bp, Emericella nidulans
gttctcgagacgagcgatcgcggtgctctcgatataagaagtggtggg

SEQ ID NO: 41290 - DNA, 48 bp, Emericella nidulans
gaattcactgcggccgccatgatctcgacaacagtcaacatgtcttca

SEQ ID NO: 41291 - DNA, 49 bp, Emericella nidulans
gttctcgagacgagcgatcgcacaagtatgccggtatacggctcggaga

SEQ ID NO: 41292 - DNA, 46 bp, Emericella nidulans
gaattcactgcggccgccatggaccggaatcacatcgacgctgtct

SEQ ID NO: 41293 - DNA, 45 bp, Emericella nidulans
gttctcgagacgagcgatcgcgagactgatggcatcggaacatcg

SEQ ID NO: 41294 - DNA, 42 bp, Emericella nidulans
gaattcactgcggccgccatgggccgcagccacaatatctcc

SEQ ID NO: 41295 - DNA, 46 bp, Emericella nidulans
gttctcgagacgagcgatcgcctggctttttgtaattcgcctgttt

SEQ ID NO: 41296 - DNA, 43 bp, Emericella nidulans
gaattcactgcggccgccatggagcggaaggtcaattttgtcg

SEQ ID NO: 41297 - DNA, 42 bp, Emericella nidulans
gttctcgagacgagcgatcgcccaggcacgagcggaatagtt

SEQ ID NO: 41298 - DNA, 41 bp, Emericella nidulans
gaattcactgcggccgccatgacttgcgtcttgacggttct

SEQ ID NO: 41299 - DNA, 41 bp, Emericella nidulans
gttctcgagacgagcgatcgcttacgaccacgcttctcctt

SEQ ID NO: 41300 - DNA, 47 bp, Emericella nidulans
gaattcactgcggccgccatgctgatatcttccagaccggccagcac

SEQ ID NO: 41301 - DNA, 41 bp, Emericella nidulans
gttctcgagacgagcgatcgccggctcgcgggacaataacg

SEQ ID NO: 41302 - DNA, 45 bp, Emericella nidulans
gaattcactgcggccgccatgttagtggccatgaagagcctgacg

SEQ ID NO: 41303 - DNA, 41 bp, Emericella nidulans
gttctcgagacgagcgatcgcgcctcggcgagcaattccct

SEQ ID NO: 41304 - DNA, 41 bp, Emericella nidulans
gaattcactgcggccgccatgttgatgccgccctggctgtt

SEQ ID NO: 41305 - DNA, 49 bp, Emericella nidulans
gttctcgagacgagcgatcgccctcgtctttgtcttctcctttctgtgg

SEQ ID NO: 41306 - DNA, 41 bp, Emericella nidulans
gaattcactgcggccgccatgaactgtgggcgccgaggttg

SEQ ID NO: 41307 - DNA, 41 bp, Emericella nidulans
gttctcgagacgagcgatcgccgcccaaaccgcattttcac

SEQ ID NO: 41308 - DNA, 41 bp, Emericella nidulans
gaattcactgcggccgccatgtggaggttcgacttccattc

SEQ ID NO: 41309 - DNA, 40 bp, Emericella nidulans
gttctcgagacgagcgatcgccagccgcttctgtctctga

SEQ ID NO: 41310 - DNA, 44 bp, Emericella nidulans
gaattcactgcggccgccatgtcattccaaactgtcacgtggtg

SEQ ID NO: 41311 - DNA, 48 bp, Emericella nidulans
gttctcgagacgagcgatcgcgcgttgttcaccagataatctagaccc

SEQ ID NO: 41312 - DNA, 49 bp, Emericella nidulans
gaattcactgcggccgccatggcatgtcacaccagattttattgggaaa

SEQ ID NO: 41313 - DNA, 44 bp, Emericella nidulans
gttctcgagacgagcgatcgccattaacgcctccggaaacaaca

SEQ ID NO: 41314 - DNA, 43 bp, Emericella nidulans
gaattcactgcggccgccatggagcatgcctcaacgttcctct

SEQ ID NO: 41315 - DNA, 45 bp, Emericella nidulans
gttctcgagacgagcgatcgcactctttctccacgccttagtggc

SEQ ID NO: 41316 - DNA, 41 bp, Emericella nidulans
gaattcactgcggccgccatgcagtccatgctgactcttcg

SEQ ID NO: 41317 - DNA, 44 bp, Emericella nidulans
gttctcgagacgagcgatcgcaataagacactttccaatctccc

SEQ ID NO: 41318 - DNA, 42 bp, Emericella nidulans
gaattcactgcggccgccatgggccaagggatatgagtatgg

SEQ ID NO: 41319 - DNA, 42 bp, Emericella nidulans
gttctcgagacgagcgatcgccccttcttgacgtcagctacc

SEQ ID NO: 41320 - DNA, 41 bp, Emericella nidulans
gaattcactgcggccgccatgatttgggatgccgttatcat

SEQ ID NO: 41321 - DNA, 47 bp, Emericella nidulans
gttctcgagacgagcgatcgcaatatcagtaccggtgtgtatcattc

SEQ ID NO: 41322 - DNA, 49 bp, Emericella nidulans
gaattcactgcggccgccatgatgaaagaaaatgcttcgctttggggtg

SEQ ID NO: 41323 - DNA, 47 bp, Emericella nidulans
gttctcgagacgagcgatcgcctctaggcaagcttcctccatgatct

SEQ ID NO: 41324 - DNA, 46 bp, Emericella nidulans
gaattcactgcggccgccatgctacctggagaggccgtcttaattg

SEQ ID NO: 41325 - DNA, 49 bp, Emericella nidulans
gttctcgagacgagcgatcgctttttccaggtgatcgaagtagccttca

SEQ ID NO: 41326 - DNA, 48 bp, Emericella nidulans
gaattcactgcggccgccatgaagtgcaacatctgtgaccgtcggttt

SEQ ID NO: 41327 - DNA, 40 bp, Emericella nidulans
gttctcgagacgagcgatcgcgcggcgcgacagggagatt

SEQ ID NO: 41328 - DNA, 48 bp, Emericella nidulans
gaattcactgcggccgccatgggatggactgtggaattgctgaaaagg

SEQ ID NO: 41329 - DNA, 41 bp, Emericella nidulans
gttctcgagacgagcgatcgcgctcgagccagtgccgtgtc

SEQ ID NO: 41330 - DNA, 43 bp, Emericella nidulans
gaattcactgcggccgccatgcagcgccattgaaggagatagc

SEQ ID NO: 41331 - DNA, 47 bp, Emericella nidulans
gttctcgagacgagcgatcgccaatgcggtttcgaacttcatcatcc

SEQ ID NO: 41332 - DNA, 45 bp, Emericella nidulans
gaattcactgcggccgccatggcatatcacatcgaaggcccagca

SEQ ID NO: 41333 - DNA, 41 bp, Emericella nidulans
gttctcgagacgagcgatcgcccatgcatggcgacgatgac

SEQ ID NO: 41334 - DNA, 43 bp, Emericella nidulans
gaattcactgcggccgccatgacccatggcttccagttcagca

SEQ ID NO: 41335 - DNA, 41 bp, Emericella nidulans
gttctcgagacgagcgatcgccgagcgcaaaccccgcatac

SEQ ID NO: 41336 - DNA, 44 bp, Emericella nidulans
gaattcactgcggccgccatgtatcgctcgtgacaaacatgcac

SEQ ID NO: 41337 - DNA, 45 bp, Emericella nidulans
gttctcgagacgagcgatcgcaacccctaagccatcgtcagtacc

SEQ ID NO: 41338 - DNA, 46 bp, Emericella nidulans
gaattcactgcggccgccatggatctctaggtggacgactgggctc

SEQ ID NO: 41339 - DNA, 45 bp, Emericella nidulans
gttctcgagacgagcgatcgctgagtatcgtgcgataccaaccca

SEQ ID NO: 41340 - DNA, 46 bp, Emericella nidulans
gaattcactgcggccgccatgacataaccccgttgcagagactcca

SEQ ID NO: 41341 - DNA, 42 bp, Emericella nidulans
gttctcgagacgagcgatcgctgcctccccaatcttcgggtt

SEQ ID NO: 41342 - DNA, 41 bp, Emericella nidulans
gaattcactgcggccgccatgagaggctaggtgcagagcag

SEQ ID NO: 41343 - DNA, 41 bp, Emericella nidulans
gttctcgagacgagcgatcgcataatccttgtcggctggtg

SEQ ID NO: 41344 - DNA, 43 bp, Emericella nidulans
gaattcactgcggccgccatggggttcaatcgctcccagctca

SEQ ID NO: 41345 - DNA, 45 bp, Emericella nidulans
gttctcgagacgagcgatcgctctcgatcatagggatcagcatcg

SEQ ID NO: 41346 - DNA, 41 bp, Emericella nidulans
gaattcactgcggccgccatgggaggcttaacagaatgctt

SEQ ID NO: 41347 - DNA, 41 bp, Emericella nidulans
gttctcgagacgagcgatcgccctcctcaatcaaagcagga

SEQ ID NO: 41348 - DNA, 41 bp, Emericella nidulans
gaattcactgcggccgccatgcatcgaaccggattggagta

SEQ ID NO: 41349 - DNA, 41 bp, Emericella nidulans
gttctcgagacgagcgatcgcgagcaaaagcgagaaccttg

SEQ ID NO: 41350 - DNA, 45 bp, Emericella nidulans
gaattcactgcggccgccatgaaatccgcgcataccatctcttgg

SEQ ID NO: 41351 - DNA, 41 bp, Emericella nidulans
gttctcgagacgagcgatcgcggcgcccttggaggatgagg

SEQ ID NO: 41352 - DNA, 42 bp, Emericella nidulans
gaattcactgcggccgccatgcgggttgaaggcgacgctctg

SEQ ID NO: 41353 - DNA, 49 bp, Emericella nidulans
gttctcgagacgagcgatcgcgcatagtatccttgaagttgggatcagc

SEQ ID NO: 41354 - DNA, 41 bp, Emericella nidulans
gaattcactgcggccgccatgtcgctctgcacagcctggaa

SEQ ID NO: 41355 - DNA, 47 bp, Emericella nidulans
gttctcgagacgagcgatcgcaccaaaagactcctccagttccattg

SEQ ID NO: 41356 - DNA, 49 bp, Emericella nidulans
gaattcactgcggccgccatgtaaggaactgggtaaaataggcaaggaa

SEQ ID NO: 41357 - DNA, 41 bp, Emericella nidulans
gttctcgagacgagcgatcgcgctccagcgcccacgtgaat

SEQ ID NO: 41358 - DNA, 45 bp, Emericella nidulans
gaattcactgcggccgccatgttgcctcacaaatcctgccttaca

SEQ ID NO: 41359 - DNA, 45 bp, Emericella nidulans
gttctcgagacgagcgatcgcctagcgtagcgcatttcaggatgg

SEQ ID NO: 41360 - DNA, 41 bp, Emericella nidulans
gaattcactgcggccgccatgagcagagaatggctctcaaa

SEQ ID NO: 41361 - DNA, 41 bp, Emericella nidulans
gttctcgagacgagcgatcgcccacaaagatgatcgcatga

SEQ ID NO: 41362 - DNA, 41 bp, Emericella nidulans
gaattcactgcggccgccatgaacgggccgtctgccatgat

SEQ ID NO: 41363 - DNA, 49 bp, Emericella nidulans
gttctcgagacgagcgatcgctgtaagaggtcttataagcgggcgtggc

SEQ ID NO: 41364 - DNA, 47 bp, Emericella nidulans
gaattcactgcggccgccatgtttgccgagtttgtggctgtagatca

SEQ ID NO: 41365 - DNA, 48 bp, Emericella nidulans
gttctcgagacgagcgatcgccggtgccgatacacaatatcttcccac

SEQ ID NO: 41366 - DNA, 41 bp, Emericella nidulans
gaattcactgcggccgccatgtcccaactccacagaaggtc

SEQ ID NO: 41367 - DNA, 42 bp, Emericella nidulans
gttctcgagacgagcgatcgctcgggacactcataacaaagc

SEQ ID NO: 41368 - DNA, 44 bp, Emericella nidulans
gaattcactgcggccgccatgcgtagtcatatatttggcagcct

SEQ ID NO: 41369 - DNA, 45 bp, Emericella nidulans
gttctcgagacgagcgatcgcaacataattctcatgtaacgtgcc

SEQ ID NO: 41370 - DNA, 45 bp, Emericella nidulans
gaattcactgcggccgccatgacacgccctacatttccccagaca

SEQ ID NO: 41371 - DNA, 46 bp, Emericella nidulans
gttctcgagacgagcgatcgctgaggagagaagatcgatagccaca

SEQ ID NO: 41372 - DNA, 43 bp, Emericella nidulans
gaattcactgcggccgccatgctctggcccatcgctggtataa

SEQ ID NO: 41373 - DNA, 45 bp, Emericella nidulans
gttctcgagacgagcgatcgctcggcattcagggtgacttcagtg

SEQ ID NO: 41374 - DNA, 48 bp, Emericella nidulans
gaattcactgcggccgccatggctactttcgtacctgtccaccaagtt

SEQ ID NO: 41375 - DNA, 46 bp, Emericella nidulans
gttctcgagacgagcgatcgctgcggtcgtataggtatagcccaag

SEQ ID NO: 41376 - DNA, 49 bp, Emericella nidulans
gaattcactgcggccgccatgacttctccgcagagtagtcgtcggcaat

SEQ ID NO: 41377 - DNA, 41 bp, Emericella nidulans
gttctcgagacgagcgatcgcggattggacagggagcatgg

SEQ ID NO: 41378 - DNA, 45 bp, Emericella nidulans
gaattcactgcggccgccatgaggatgctacacatcgccatcctc

SEQ ID NO: 41379 - DNA, 48 bp, Emericella nidulans
gttctcgagacgagcgatcgcggagttagtttaatggatgccaatccc

SEQ ID NO: 41380 - DNA, 46 bp, Emericella nidulans
gaattcactgcggccgccatgccatgatgccgcctttaatggcact

SEQ ID NO: 41381 - DNA, 44 bp, Emericella nidulans
gttctcgagacgagcgatcgctcccaatggatgtcagcaaacca

SEQ ID NO: 41382 - DNA, 42 bp, Emericella nidulans
gaattcactgcggccgccatgcccagaaatacttcgagtcca

SEQ ID NO: 41383 - DNA, 41 bp, Emericella nidulans
gttctcgagacgagcgatcgccgggtagaaggtttcttcgt

SEQ ID NO: 41384 - DNA, 48 bp, Emericella nidulans
gaattcactgcggccgccatgtcagtatattctacgtgcgctctaccg

SEQ ID NO: 41385 - DNA, 43 bp, Emericella nidulans
gttctcgagacgagcgatcgccatcagcagtggcaccgagttc

SEQ ID NO: 41386 - DNA, 41 bp, Emericella nidulans
gaattcactgcggccgccatgctgcaagccctcaaacacta

SEQ ID NO: 41387 - DNA, 45 bp, Emericella nidulans
gttctcgagacgagcgatcgcatccacgactttataagtccctca

SEQ ID NO: 41388 - DNA, 46 bp, Emericella nidulans
gaattcactgcggccgccatgtcttcgcaggagtggtactgacttg

SEQ ID NO: 41389 - DNA, 49 bp, Emericella nidulans
gttctcgagacgagcgatcgcgagatgcctgctatcgataatgcgcttg

SEQ ID NO: 41390 - DNA, 41 bp, Emericella nidulans
gaattcactgcggccgccatgtacggccgagacagtgtatg

SEQ ID NO: 41391 - DNA, 45 bp, Emericella nidulans
gttctcgagacgagcgatcgcgagatgtactggatattggcaaag

SEQ ID NO: 41392 - DNA, 41 bp, Emericella nidulans
gaattcactgcggccgccatgtggatgcgctaaccacagta

SEQ ID NO: 41393 - DNA, 41 bp, Emericella nidulans
gttctcgagacgagcgatcgcgggaatggagaaaagcaggt

SEQ ID NO: 41394 - DNA, 41 bp, Emericella nidulans
gaattcactgcggccgccatgggagtaccctgtggctggta

SEQ ID NO: 41395 - DNA, 41 bp, Emericella nidulans
gttctcgagacgagcgatcgcagatcatgacacccccaaag

SEQ ID NO: 41396 - DNA, 41 bp, Emericella nidulans
gaattcactgcggccgccatgaccacatcaacccctcagat

SEQ ID NO: 41397 - DNA, 41 bp, Emericella nidulans
gttctcgagacgagcgatcgcatttccatcacggtccagag

SEQ ID NO: 41398 - DNA, 49 bp, Emericella nidulans
gaattcactgcggccgccatgttcgcaatacagttccggctctgagcat

SEQ ID NO: 41399 - DNA, 46 bp, Emericella nidulans
gttctcgagacgagcgatcgccctctgttgagcaatcatttgttgg

SEQ ID NO: 41400 - DNA, 41 bp, Emericella nidulans
gaattcactgcggccgccatgtgcttgaagggcacgggtca

SEQ ID NO: 41401 - DNA, 48 bp, Emericella nidulans
gttctcgagacgagcgatcgcatccagtcaaagttctcgtggcaactg

SEQ ID NO: 41402 - DNA, 49 bp, Emericella nidulans
gaattcactgcggccgccatgacactaccacctacagatcctggcgtgt

SEQ ID NO: 41403 - DNA, 47 bp, Emericella nidulans
gttctcgagacgagcgatcgccttcaacgtaaaacccccgtcagtcc

SEQ ID NO: 41404 - DNA, 41 bp, Emericella nidulans
gaattcactgcggccgccatgactccgtgacctcgtactgg

SEQ ID NO: 41405 - DNA, 41 bp, Emericella nidulans
gttctcgagacgagcgatcgccacaatgccaaagttgttcg

SEQ ID NO: 41406 - DNA, 42 bp, Emericella nidulans
gaattcactgcggccgccatggcctacgcgagacgtcggagc

SEQ ID NO: 41407 - DNA, 41 bp, Emericella nidulans
gttctcgagacgagcgatcgcggcgtagtcgggcgcagaga

SEQ ID NO: 41408 - DNA, 43 bp, Emericella nidulans
gaattcactgcggccgccatgaagtcgctgccattccaagctc

SEQ ID NO: 41409 - DNA, 46 bp, Emericella nidulans
gttctcgagacgagcgatcgcacgcacaattcccttgtaaccacca

SEQ ID NO: 41410 - DNA, 44 bp, Emericella nidulans
gaattcactgcggccgccatgcccggacttctataatccttgtc

SEQ ID NO: 41411 - DNA, 41 bp, Emericella nidulans
gttctcgagacgagcgatcgctcatccagtgcattcgtgac

SEQ ID NO: 41412 - DNA, 41 bp, Emericella nidulans
gaattcactgcggccgccatgtgctcagtatgcatgggact

SEQ ID NO: 41413 - DNA, 46 bp, Emericella nidulans
gttctcgagacgagcgatcgcaaatatttggtttatggttttactg

SEQ ID NO: 41414 - DNA, 42 bp, Emericella nidulans
gaattcactgcggccgccatgctacctccaccttgacattcc

SEQ ID NO: 41415 - DNA, 40 bp, Emericella nidulans
gttctcgagacgagcgatcgcaagatgcctccccagacac

SEQ ID NO: 41416 - DNA, 41 bp, Emericella nidulans
gaattcactgcggccgccatggccggtatgtcactcctctc

SEQ ID NO: 41417 - DNA, 41 bp, Emericella nidulans
gttctcgagacgagcgatcgcaaccggctcgagttctgact

SEQ ID NO: 41418 - DNA, 42 bp, Emericella nidulans
gaattcactgcggccgccatgcatcgaaggagccatcgagca

SEQ ID NO: 41419 - DNA, 41 bp, Emericella nidulans
gttctcgagacgagcgatcgcccatggcagtgtttcgtcca

SEQ ID NO: 41420 - DNA, 42 bp, Emericella nidulans
gaattcactgcggccgccatgtgtcctgtatgacaccacctg

SEQ ID NO: 41421 - DNA, 41 bp, Emericella nidulans
gttctcgagacgagcgatcgccgacgacgcatccctatatt

SEQ ID NO: 41422 - DNA, 49 bp, Emericella nidulans
gaattcactgcggccgccatgttacaccactatggacgtcattcagaag

SEQ ID NO: 41423 - DNA, 42 bp, Emericella nidulans
gttctcgagacgagcgatcgcagatcggccggcaatatgtca

SEQ ID NO: 41424 - DNA, 42 bp, Emericella nidulans
gaattcactgcggccgccatgcgccgtctccaaagcgctaga

SEQ ID NO: 41425 - DNA, 49 bp, Emericella nidulans
gttctcgagacgagcgatcgccgggacttgtatttgatatcgtagagga

SEQ ID NO: 41426 - DNA, 41 bp, Emericella nidulans
gaattcactgcggccgccatgggcaaacgcctcgtctgggt

SEQ ID NO: 41427 - DNA, 46 bp, Emericella nidulans
gttctcgagacgagcgatcgcagcaccagacccagactcttcactc

SEQ ID NO: 41428 - DNA, 47 bp, Emericella nidulans
gaattcactgcggccgccatgtgaaagtctttgctggagcttgcctc

SEQ ID NO: 41429 - DNA, 42 bp, Emericella nidulans
gttctcgagacgagcgatcgctcggccgcaatgaatagcctc

SEQ ID NO: 41430 - DNA, 49 bp, Emericella nidulans
gaattcactgcggccgccatgaaaaggaacaaactctcccctgggcatt

SEQ ID NO: 41431 - DNA, 41 bp, Emericella nidulans
gttctcgagacgagcgatcgcgtccaccgcaaaccgcccac

SEQ ID NO: 41432 - DNA, 41 bp, Emericella nidulans
gaattcactgcggccgccatgacccatcactctttcccctc

SEQ ID NO: 41433 - DNA, 41 bp, Emericella nidulans
gttctcgagacgagcgatcgccacgatactgttcgcaaagg

SEQ ID NO: 41434 - DNA, 44 bp, Emericella nidulans
gaattcactgcggccgccatgttcggtgcttactcctccaacct

SEQ ID NO: 41435 - DNA, 41 bp, Emericella nidulans
gttctcgagacgagcgatcgctgtggtggaaaggcggttga

SEQ ID NO: 41436 - DNA, 46 bp, Emericella nidulans
gaattcactgcggccgccatggtcggcagactatgttgacttctgg

SEQ ID NO: 41437 - DNA, 48 bp, Emericella nidulans
gttctcgagacgagcgatcgcagacgaaatacccgattagcctctttt

SEQ ID NO: 41438 - DNA, 48 bp, Emericella nidulans
gaattcactgcggccgccatggattacggagttcggtttgtcgacttg

SEQ ID NO: 41439 - DNA, 48 bp, Emericella nidulans
gttctcgagacgagcgatcgccccatttgcgagatatcgacatgaatc

SEQ ID NO: 41440 - DNA, 42 bp, Emericella nidulans
gaattcactgcggccgccatgcgatccatgttcgaccggagc

SEQ ID NO: 41441 - DNA, 42 bp, Emericella nidulans
gttctcgagacgagcgatcgcgcccagcacgtccgaggtctt

SEQ ID NO: 41442 - DNA, 41 bp, Emericella nidulans
gaattcactgcggccgccatgcagctttctgccggcggttc

SEQ ID NO: 41443 - DNA, 46 bp, Emericella nidulans
gttctcgagacgagcgatcgcaggtagttggtggtgatccaagcat

SEQ ID NO: 41444 - DNA, 47 bp, Emericella nidulans
gaattcactgcggccgccatggggctattatgagggttggagcatga

SEQ ID NO: 41445 - DNA, 41 bp, Emericella nidulans
gttctcgagacgagcgatcgcctggggctccagccacttgc

SEQ ID NO: 41446 - DNA, 41 bp, Emericella nidulans
gaattcactgcggccgccatgggatgcgggattacggtgcc

SEQ ID NO: 41447 - DNA, 46 bp, Emericella nidulans
gttctcgagacgagcgatcgcatgttgggcacaaagtagctgacga

SEQ ID NO: 41448 - DNA, 40 bp, Emericella nidulans
gaattcactgcggccgccatgcggccttctgggcttatac

SEQ ID NO: 41449 - DNA, 42 bp, Emericella nidulans
gttctcgagacgagcgatcgccagctgttaggctaacctgga

SEQ ID NO: 41450 - DNA, 43 bp, Emericella nidulans
gaattcactgcggccgccatgtttttgcgggccgtgcaatact

SEQ ID NO: 41451 - DNA, 41 bp, Emericella nidulans
gttctcgagacgagcgatcgcccgaatacctggcggcagca

SEQ ID NO: 41452 - DNA, 41 bp, Emericella nidulans
gaattcactgcggccgccatgtcctggccgaccttctgtcg

SEQ ID NO: 41453 - DNA, 44 bp, Emericella nidulans
gttctcgagacgagcgatcgcttgttatggtgcacttggctgga

SEQ ID NO: 41454 - DNA, 41 bp, Emericella nidulans
gaattcactgcggccgccatgtttgcagcatgttcgtaagc

SEQ ID NO: 41455 - DNA, 40 bp, Emericella nidulans
gttctcgagacgagcgatcgcgggcaaattcatccctcat

SEQ ID NO: 41456 - DNA, 49 bp, Emericella nidulans
gaattcactgcggccgccatgttgcgtgtctaactctcacagacttttc

SEQ ID NO: 41457 - DNA, 41 bp, Emericella nidulans
gttctcgagacgagcgatcgctgaggccggagtcgctgtca

SEQ ID NO: 41458 - DNA, 42 bp, Emericella nidulans
gaattcactgcggccgccatgtccttcggcgagctcctctca

SEQ ID NO: 41459 - DNA, 41 bp, Emericella nidulans
gttctcgagacgagcgatcgcctgcccccttgctgggtcct

SEQ ID NO: 41460 - DNA, 49 bp, Emericella nidulans
gaattcactgcggccgccatgttgctaactgtcactatcatagcctccc

SEQ ID NO: 41461 - DNA, 48 bp, Emericella nidulans
gttctcgagacgagcgatcgcgggatactcgacctgatggcggctttt

SEQ ID NO: 41462 - DNA, 42 bp, Emericella nidulans
gaattcactgcggccgccatgccggacgctcctattcgctcc

SEQ ID NO: 41463 - DNA, 46 bp, Emericella nidulans
gttctcgagacgagcgatcgccgaagaggcctcttctgacgcgaaa

SEQ ID NO: 41464 - DNA, 41 bp, Emericella nidulans
gaattcactgcggccgccatggtcgcgctcgtggcacaaaa

SEQ ID NO: 41465 - DNA, 42 bp, Emericella nidulans
gttctcgagacgagcgatcgctgggaggtacggcgtcgaggt

SEQ ID NO: 41466 - DNA, 41 bp, Emericella nidulans
gaattcactgcggccgccatgctctcgcagcaggcatcgtc

SEQ ID NO: 41467 - DNA, 43 bp, Emericella nidulans
gttctcgagacgagcgatcgcaaaccacccgggatggatcagg

SEQ ID NO: 41468 - DNA, 44 bp, Emericella nidulans
gaattcactgcggccgccatggaatcctttgcttcggctttgga

SEQ ID NO: 41469 - DNA, 49 bp, Emericella nidulans
gttctcgagacgagcgatcgccatcgctgtattcaaggacatgatggtg

SEQ ID NO: 41470 - DNA, 41 bp, Emericella nidulans
gaattcactgcggccgccatgatctcgctatacccagttcg

SEQ ID NO: 41471 - DNA, 40 bp, Emericella nidulans
gttctcgagacgagcgatcgccgactgccgcctataccag

SEQ ID NO: 41472 - DNA, 41 bp, Emericella nidulans
gaattcactgcggccgccatggtcccggactgttcagacat

SEQ ID NO: 41473 - DNA, 45 bp, Emericella nidulans
gttctcgagacgagcgatcgctaatagcctccagaaaactcttgc

SEQ ID NO: 41474 - DNA, 42 bp, Emericella nidulans
gaattcactgcggccgccatgccgaacttgcgcacgctcatc

SEQ ID NO: 41475 - DNA, 44 bp, Emericella nidulans
gttctcgagacgagcgatcgctccttgacaaaacccaacgggat

SEQ ID NO: 41476 - DNA, 48 bp, Emericella nidulans
gaattcactgcggccgccatgctctccttcccctcatcctagactcca

SEQ ID NO: 41477 - DNA, 48 bp, Emericella nidulans
gttctcgagacgagcgatcgccttgatcctgttctcattgccagaacc

SEQ ID NO: 41478 - DNA, 41 bp, Emericella nidulans
gaattcactgcggccgccatggggagactcgtcgcataaag

SEQ ID NO: 41479 - DNA, 41 bp, Emericella nidulans
gttctcgagacgagcgatcgcctcagccatggttgatttga

SEQ ID NO: 41480 - DNA, 49 bp, Emericella nidulans
gaattcactgcggccgccatggagtttctggacgatctcgtggtcgatg

SEQ ID NO: 41481 - DNA, 44 bp, Emericella nidulans
gttctcgagacgagcgatcgccatgcgtttcaggaatgccttgt

SEQ ID NO: 41482 - DNA, 40 bp, Emericella nidulans
gaattcactgcggccgccatgcactttattggcctgcaac

SEQ ID NO: 41483 - DNA, 41 bp, Emericella nidulans
gttctcgagacgagcgatcgccagtgattccggatgtagcc

SEQ ID NO: 41484 - DNA, 49 bp, Emericella nidulans
gaattcactgcggccgccatgttataccgagtatatgcgggagaaatca

SEQ ID NO: 41485 - DNA, 42 bp, Emericella nidulans
gttctcgagacgagcgatcgcgctcgcgctccagctttctga

SEQ ID NO: 41486 - DNA, 45 bp, Emericella nidulans
gaattcactgcggccgccatgcatacggataaagcatacgacttc

SEQ ID NO: 41487 - DNA, 41 bp, Emericella nidulans
gttctcgagacgagcgatcgcaccatcttgccaagagtcca

SEQ ID NO: 41488 - DNA, 43 bp, Emericella nidulans
gaattcactgcggccgccatggggggaacagaaatgggacagg

SEQ ID NO: 41489 - DNA, 44 bp, Emericella nidulans
gttctcgagacgagcgatcgcgactcagatggcaacggcttctc

SEQ ID NO: 41490 - DNA, 41 bp, Emericella nidulans
gaattcactgcggccgccatgtcgcgactcgctccgtgaga

SEQ ID NO: 41491 - DNA, 49 bp, Emericella nidulans
gttctcgagacgagcgatcgctaacatgagctgagagagatggatcttg

SEQ ID NO: 41492 - DNA, 44 bp, Emericella nidulans
gaattcactgcggccgccatgtttaaccgggagcgcatgcacaa

SEQ ID NO: 41493 - DNA, 41 bp, Emericella nidulans
gttctcgagacgagcgatcgcctcagtcggctgcggggtct

SEQ ID NO: 41494 - DNA, 46 bp, Emericella nidulans
gaattcactgcggccgccatggaaacgattgacagagcaatgatcg

SEQ ID NO: 41495 - DNA, 48 bp, Emericella nidulans
gttctcgagacgagcgatcgcgaggtcagtgtagcatttagcctgctt

SEQ ID NO: 41496 - DNA, 44 bp, Emericella nidulans
gaattcactgcggccgccatgatgtcctttccgcccagtactca

SEQ ID NO: 41497 - DNA, 49 bp, Emericella nidulans
gttctcgagacgagcgatcgcatgttgttagtgcttccattttcgctac

SEQ ID NO: 41498 - DNA, 44 bp, Emericella nidulans
gaattcactgcggccgccatgctgagctactctctggtgatttc

SEQ ID NO: 41499 - DNA, 41 bp, Emericella nidulans
gttctcgagacgagcgatcgcttcctgctcgtgttaattgc

SEQ ID NO: 41500 - DNA, 44 bp, Emericella nidulans
gaattcactgcggccgccatgctccccgttcatactccaaggaa

SEQ ID NO: 41501 - DNA, 43 bp, Emericella nidulans
gttctcgagacgagcgatcgccagcgcttcgaagagcggtagg

SEQ ID NO: 41502 - DNA, 41 bp, Emericella nidulans
gaattcactgcggccgccatgaccccctatcaacctcatca

SEQ ID NO: 41503 - DNA, 40 bp, Emericella nidulans
gttctcgagacgagcgatcgcaaagtaccgcctccaccac

SEQ ID NO: 41504 - DNA, 41 bp, Emericella nidulans
gaattcactgcggccgccatggtatgcaccggatgcttttt

SEQ ID NO: 41505 - DNA, 46 bp, Emericella nidulans
gttctcgagacgagcgatcgcaaaagaaagatagaggatgtttagc

SEQ ID NO: 41506 - DNA, 46 bp, Emericella nidulans
gaattcactgcggccgccatgtttatatggaaggatatggcttttc

SEQ ID NO: 41507 - DNA, 41 bp, Emericella nidulans
gttctcgagacgagcgatcgctagctggttccattgctgag

SEQ ID NO: 41508 - DNA, 49 bp, Emericella nidulans
gaattcactgcggccgccatgagaagagctcgagaagcagatttactgg

SEQ ID NO: 41509 - DNA, 41 bp, Emericella nidulans
gttctcgagacgagcgatcgctgcccgctgacacaggtccc

SEQ ID NO: 41510 - DNA, 44 bp, Emericella nidulans
gaattcactgcggccgccatggaagatcactaccacatccatcc

SEQ ID NO: 41511 - DNA, 41 bp, Emericella nidulans
gttctcgagacgagcgatcgcacccgctcaataccatcaag

SEQ ID NO: 41512 - DNA, 41 bp, Emericella nidulans
gaattcactgcggccgccatggcgttgtggtcaacgatatg

SEQ ID NO: 41513 - DNA, 46 bp, Emericella nidulans
gttctcgagacgagcgatcgcgtcttctaggagatacggtatggaa

SEQ ID NO: 41514 - DNA, 46 bp, Emericella nidulans
gaattcactgcggccgccatgagctaaataagaagaaagaagatcg

SEQ ID NO: 41515 - DNA, 41 bp, Emericella nidulans
gttctcgagacgagcgatcgcgtaggtgatgctgcctgtga

SEQ ID NO: 41516 - DNA, 44 bp, Emericella nidulans
gaattcactgcggccgccatgaagagcaaaacacttcgcgagca

SEQ ID NO: 41517 - DNA, 41 bp, Emericella nidulans
gttctcgagacgagcgatcgcctgctgctgcgcccgcctct

SEQ ID NO: 41518 - DNA, 41 bp, Emericella nidulans
gaattcactgcggccgccatgacggcatcaaagccgtgagt

SEQ ID NO: 41519 - DNA, 43 bp, Emericella nidulans
gttctcgagacgagcgatcgcgccctcagcaatatcccaccca

SEQ ID NO: 41520 - DNA, 44 bp, Emericella nidulans
gaattcactgcggccgccatggtgctacctggaatcgttgggtc

SEQ ID NO: 41521 - DNA, 41 bp, Emericella nidulans
gttctcgagacgagcgatcgcggtctcccgacgccggttta

SEQ ID NO: 41522 - DNA, 46 bp, Emericella nidulans
gaattcactgcggccgccatggaaaacatgttcgaagctgcattgt

SEQ ID NO: 41523 - DNA, 49 bp, Emericella nidulans
gttctcgagacgagcgatcgctcaaataatcctagtagcagcagcctca

SEQ ID NO: 41524 - DNA, 44 bp, Emericella nidulans
gaattcactgcggccgccatggagttcttcctcgtccgatttgg

SEQ ID NO: 41525 - DNA, 49 bp, Emericella nidulans
gttctcgagacgagcgatcgcatggttgggaaaggtaacgctggggaag

SEQ ID NO: 41526 - DNA, 41 bp, Emericella nidulans
gaattcactgcggccgccatgttcccatccgccacccagaa

SEQ ID NO: 41527 - DNA, 47 bp, Emericella nidulans
gttctcgagacgagcgatcgcgcctgcttcattctctgctgttacga

SEQ ID NO: 41528 - DNA, 47 bp, Emericella nidulans
gaattcactgcggccgccatgctgtctatcgtctctacggtcccctc

SEQ ID NO: 41529 - DNA, 44 bp, Emericella nidulans
gttctcgagacgagcgatcgcggaaatggtgttttgcagggtgc

SEQ ID NO: 41530 - DNA, 48 bp, Emericella nidulans
gaattcactgcggccgccatgcctgtcctttctatagacctcgctcca

SEQ ID NO: 41531 - DNA, 49 bp, Emericella nidulans
gttctcgagacgagcgatcgcgatatcccacaatgagatctttccgtct

SEQ ID NO: 41532 - DNA, 41 bp, Emericella nidulans
gaattcactgcggccgccatgaatctcgcgattcagatgct

SEQ ID NO: 41533 - DNA, 41 bp, Emericella nidulans
gttctcgagacgagcgatcgcctttccaaccaagtcccaaa

SEQ ID NO: 41534 - DNA, 42 bp, Emericella nidulans
gaattcactgcggccgccatgggtgatgccagtcatcaaatc

SEQ ID NO: 41535 - DNA, 41 bp, Emericella nidulans
gttctcgagacgagcgatcgcccttgctggtattcggctta

SEQ ID NO: 41536 - DNA, 40 bp, Emericella nidulans
gaattcactgcggccgccatgcggccgtgtgcgaagcaag

SEQ ID NO: 41537 - DNA, 44 bp, Emericella nidulans
gttctcgagacgagcgatcgctgcagcctttttcatggttttcc

SEQ ID NO: 41538 - DNA, 49 bp, Emericella nidulans
gaattcactgcggccgccatgcatcgtcactggatgatgctattacctc

SEQ ID NO: 41539 - DNA, 41 bp, Emericella nidulans
gttctcgagacgagcgatcgctggcagcggccactctttca

SEQ ID NO: 41540 - DNA, 49 bp, Emericella nidulans
gaattcactgcggccgccatgtcctcgatgggtataccgtacgctcgtt

SEQ ID NO: 41541 - DNA, 44 bp, Emericella nidulans
gttctcgagacgagcgatcgccgggataccgatatccctcctca

SEQ ID NO: 41542 - DNA, 41 bp, Emericella nidulans
gaattcactgcggccgccatgggattcccttgcgagtacat

SEQ ID NO: 41543 - DNA, 41 bp, Emericella nidulans
gttctcgagacgagcgatcgccgcgtaggtgacagtgagtc

SEQ ID NO: 41544 - DNA, 41 bp, Emericella nidulans
gaattcactgcggccgccatgggcgagaacgactggattac

SEQ ID NO: 41545 - DNA, 41 bp, Emericella nidulans
gttctcgagacgagcgatcgctgccaatactagctgcgttt

SEQ ID NO: 41546 - DNA, 41 bp, Emericella nidulans
gaattcactgcggccgccatggtccccgggcttggcattct

SEQ ID NO: 41547 - DNA, 41 bp, Emericella nidulans
gttctcgagacgagcgatcgcgctccgagagcgcagacggt

SEQ ID NO: 41548 - DNA, 42 bp, Emericella nidulans
gaattcactgcggccgccatgtcatgactactcggaaccaca

SEQ ID NO: 41549 - DNA, 41 bp, Emericella nidulans
gttctcgagacgagcgatcgcagccagtcacaccaaggaac

SEQ ID NO: 41550 - DNA, 49 bp, Emericella nidulans
gaattcactgcggccgccatgttagtatgaacaaccaatatacctaaga

SEQ ID NO: 41551 - DNA, 43 bp, Emericella nidulans
gttctcgagacgagcgatcgcctcgttatagttctcgatctgc

SEQ ID NO: 41552 - DNA, 47 bp, Emericella nidulans
gaattcactgcggccgccatgggaagaagaggaggaagagttgagca

SEQ ID NO: 41553 - DNA, 46 bp, Emericella nidulans
gttctcgagacgagcgatcgccgttaggttagaagccggttcctcc

SEQ ID NO: 41554 - DNA, 49 bp, Emericella nidulans
gaattcactgcggccgccatgaggatgaagataccgtacgtgatgaact

SEQ ID NO: 41555 - DNA, 44 bp, Emericella nidulans
gttctcgagacgagcgatcgcatgcagaagaccccatggaagga

SEQ ID NO: 41556 - DNA, 48 bp, Emericella nidulans
gaattcactgcggccgccatgcgaacatgagaaagcagtacgtttttg

SEQ ID NO: 41557 - DNA, 44 bp, Emericella nidulans
gttctcgagacgagcgatcgccgatcacgcgtgacttgccgaga

SEQ ID NO: 41558 - DNA, 48 bp, Emericella nidulans
gaattcactgcggccgccatgaaccctgaggtttttcgatacttgtgc

SEQ ID NO: 41559 - DNA, 44 bp, Emericella nidulans
gttctcgagacgagcgatcgccgtagacagcgatggcgataacc

SEQ ID NO: 41560 - DNA, 42 bp, Emericella nidulans
gaattcactgcggccgccatgactggcgccgattgagcactg

SEQ ID NO: 41561 - DNA, 46 bp, Emericella nidulans
gttctcgagacgagcgatcgccttaaacggcgagcctttttgggat

SEQ ID NO: 41562 - DNA, 43 bp, Emericella nidulans
gaattcactgcggccgccatgaagaggcggccaagaagaagca

SEQ ID NO: 41563 - DNA, 49 bp, Emericella nidulans
gttctcgagacgagcgatcgcagtgtcctcagtacgacctgatagaacg

SEQ ID NO: 41564 - DNA, 49 bp, Emericella nidulans
gaattcactgcggccgccatgctgagatggcagaaatcgcctctctaac

SEQ ID NO: 41565 - DNA, 42 bp, Emericella nidulans
gttctcgagacgagcgatcgctgctgcgggttgatcggattg

SEQ ID NO: 41566 - DNA, 41 bp, Emericella nidulans
gaattcactgcggccgccatgccgcgctggaaatggcagat

SEQ ID NO: 41567 - DNA, 48 bp, Emericella nidulans
gttctcgagacgagcgatcgcgaatatcaaatcccaaacaaccaacca

SEQ ID NO: 41568 - DNA, 40 bp, Emericella nidulans
gaattcactgcggccgccatgcgtcgccgccaatgtcgat

SEQ ID NO: 41569 - DNA, 46 bp, Emericella nidulans
gttctcgagacgagcgatcgcatcgacacattgttcaaacccacca

SEQ ID NO: 41570 - DNA, 43 bp, Emericella nidulans
gaattcactgcggccgccatgcaagtgcgctcagaaggagacg

SEQ ID NO: 41571 - DNA, 44 bp, Emericella nidulans
gttctcgagacgagcgatcgccgggctccgcgtagctaggagat

SEQ ID NO: 41572 - DNA, 48 bp, Emericella nidulans
gaattcactgcggccgccatgctatcaggccactcgaaagtgtagtgc

SEQ ID NO: 41573 - DNA, 49 bp, Emericella nidulans
gttctcgagacgagcgatcgctaatgcatatcttgacaaattgaggtgg

SEQ ID NO: 41574 - DNA, 49 bp, Emericella nidulans
gaattcactgcggccgccatgcattcaatgtctagggtgcttgattgga

SEQ ID NO: 41575 - DNA, 49 bp, Emericella nidulans
gttctcgagacgagcgatcgcatctgctaataacctaccgaaccgcact

SEQ ID NO: 41576 - DNA, 41 bp, Emericella nidulans
gaattcactgcggccgccatgcggattgggggctcgaaaca

SEQ ID NO: 41577 - DNA, 46 bp, Emericella nidulans
gttctcgagacgagcgatcgcaagtcgccgtgcttttaggactgct

SEQ ID NO: 41578 - DNA, 46 bp, Emericella nidulans
gaattcactgcggccgccatgcacttccttcgcaatctgcgccaaa

SEQ ID NO: 41579 - DNA, 41 bp, Emericella nidulans
gttctcgagacgagcgatcgcctggaacgcgcacgcaatgt

SEQ ID NO: 41580 - DNA, 41 bp, Emericella nidulans
gaattcactgcggccgccatgtccagctgctagtccatcaa

SEQ ID NO: 41581 - DNA, 41 bp, Emericella nidulans
gttctcgagacgagcgatcgctcatcgtgtggaatatacgc

SEQ ID NO: 41582 - DNA, 47 bp, Emericella nidulans
gaattcactgcggccgccatggtgcttggatccttgcactctcttcc

SEQ ID NO: 41583 - DNA, 41 bp, Emericella nidulans
gttctcgagacgagcgatcgctgcgtcctctttgggccacc

SEQ ID NO: 41584 - DNA, 40 bp, Emericella nidulans
gaattcactgcggccgccatggggcgcaagggcacgctta

SEQ ID NO: 41585 - DNA, 45 bp, Emericella nidulans
gttctcgagacgagcgatcgcgaagtggacggtgcatacaactgc

SEQ ID NO: 41586 - DNA, 43 bp, Emericella nidulans
gaattcactgcggccgccatgcaagctggtgcggaagcttgat

SEQ ID NO: 41587 - DNA, 41 bp, Emericella nidulans
gttctcgagacgagcgatcgccacggcaggcctccttcagc

SEQ ID NO: 41588 - DNA, 41 bp, Emericella nidulans
gaattcactgcggccgccatgccagctttgggagcgcattc

SEQ ID NO: 41589 - DNA, 40 bp, Emericella nidulans
gttctcgagacgagcgatcgcccaattggggagccggtgc

SEQ ID NO: 41590 - DNA, 44 bp, Emericella nidulans
gaattcactgcggccgccatgactgtgtgataggatatgggagg

SEQ ID NO: 41591 - DNA, 46 bp, Emericella nidulans
gttctcgagacgagcgatcgcaaactacctacaagtgatggagtgc

SEQ ID NO: 41592 - DNA, 41 bp, Emericella nidulans
gaattcactgcggccgccatggttggcgcccgtcggtatca

SEQ ID NO: 41593 - DNA, 41 bp, Emericella nidulans
gttctcgagacgagcgatcgcggtggccgcgaaaaagaggg

SEQ ID NO: 41594 - DNA, 48 bp, Emericella nidulans
gaattcactgcggccgccatgacgggaaaacagcttatgttcatgttc

SEQ ID NO: 41595 - DNA, 44 bp, Emericella nidulans
gttctcgagacgagcgatcgcgggattactttcgggtcaacagc

SEQ ID NO: 41596 - DNA, 44 bp, Emericella nidulans
gaattcactgcggccgccatgcctggatcgtgaggcatttgaca

SEQ ID NO: 41597 - DNA, 45 bp, Emericella nidulans
gttctcgagacgagcgatcgccactgttctgggtggccctctcat

SEQ ID NO: 41598 - DNA, 42 bp, Emericella nidulans
gaattcactgcggccgccatgcaccgaagaaagaaaagctga

SEQ ID NO: 41599 - DNA, 42 bp, Emericella nidulans
gttctcgagacgagcgatcgcttgtaaacgttatgcgtgtcg

SEQ ID NO: 41600 - DNA, 41 bp, Emericella nidulans
gaattcactgcggccgccatgggggcatccatgcgaacgaa

SEQ ID NO: 41601 - DNA, 42 bp, Emericella nidulans
gttctcgagacgagcgatcgcatattcggcggcgaacctgct

SEQ ID NO: 41602 - DNA, 41 bp, Emericella nidulans
gaattcactgcggccgccatgccgctggtacgaatgatctc

SEQ ID NO: 41603 - DNA, 39 bp, Emericella nidulans
gttctcgagacgagcgatcgcaggagcggtgttcgggat

SEQ ID NO: 41604 - DNA, 49 bp, Emericella nidulans
gaattcactgcggccgccatgatgattagcatggtattcccgtcgggtc

SEQ ID NO: 41605 - DNA, 46 bp, Emericella nidulans
gttctcgagacgagcgatcgcagccatagcgtggaagaaaaattca

SEQ ID NO: 41606 - DNA, 44 bp, Emericella nidulans
gaattcactgcggccgccatgatgttgacctcggcgagatgctg

SEQ ID NO: 41607 - DNA, 41 bp, Emericella nidulans
gttctcgagacgagcgatcgcgcgactgggggctgacttgc

SEQ ID NO: 41608 - DNA, 41 bp, Emericella nidulans
gaattcactgcggccgccatgcaccagccatcctagtgaca

SEQ ID NO: 41609 - DNA, 41 bp, Emericella nidulans
gttctcgagacgagcgatcgcaggagatagaccccggagaa

SEQ ID NO: 41610 - DNA, 41 bp, Emericella nidulans
gaattcactgcggccgccatgctctgacggaggaggagaag

SEQ ID NO: 41611 - DNA, 41 bp, Emericella nidulans
gttctcgagacgagcgatcgcatcggcctcgtgtaagatgt

SEQ ID NO: 41612 - DNA, 44 bp, Emericella nidulans
gaattcactgcggccgccatgtcgcgaactcttctcagctcctc

SEQ ID NO: 41613 - DNA, 41 bp, Emericella nidulans
gttctcgagacgagcgatcgctgcagagccgctggttacga

SEQ ID NO: 41614 - DNA, 42 bp, Emericella nidulans
gaattcactgcggccgccatgggcaacgacggacactgacaa

SEQ ID NO: 41615 - DNA, 49 bp, Emericella nidulans
gttctcgagacgagcgatcgcagtttgtaacctcagcaaaactcggaaa

SEQ ID NO: 41616 - DNA, 49 bp, Emericella nidulans
gaattcactgcggccgccatggtttaagagtcattggagtctggagtgc

SEQ ID NO: 41617 - DNA, 41 bp, Emericella nidulans
gttctcgagacgagcgatcgccgttcgcgcgagcaagatcc

SEQ ID NO: 41618 - DNA, 44 bp, Emericella nidulans
gaattcactgcggccgccatgcacaagcgaccagctcaaggcac

SEQ ID NO: 41619 - DNA, 45 bp, Emericella nidulans
gttctcgagacgagcgatcgcacttcttcctcttcgtcggcttgg

SEQ ID NO: 41620 - DNA, 44 bp, Emericella nidulans
gaattcactgcggccgccatgtcgtaatgggatcacgcctctcc

SEQ ID NO: 41621 - DNA, 46 bp, Emericella nidulans
gttctcgagacgagcgatcgcattgggggtatatttgcgtcctccc

SEQ ID NO: 41622 - DNA, 44 bp, Emericella nidulans
gaattcactgcggccgccatgcagtcctgcgctcctatctcgaa

SEQ ID NO: 41623 - DNA, 42 bp, Emericella nidulans
gttctcgagacgagcgatcgccgtggctggctgggttattca

SEQ ID NO: 41624 - DNA, 41 bp, Emericella nidulans
gaattcactgcggccgccatgggaagatgatgatggcgaag

SEQ ID NO: 41625 - DNA, 40 bp, Emericella nidulans
gttctcgagacgagcgatcgcgagtgggcaagatcccatt

SEQ ID NO: 41626 - DNA, 47 bp, Emericella nidulans
gaattcactgcggccgccatgataatcgcggaatgatgatggagagc

SEQ ID NO: 41627 - DNA, 41 bp, Emericella nidulans
gttctcgagacgagcgatcgcctgcgcgggtgagctcattg

SEQ ID NO: 41628 - DNA, 41 bp, Emericella nidulans
gaattcactgcggccgccatgtggatcccaactacgaggtc

SEQ ID NO: 41629 - DNA, 41 bp, Emericella nidulans
gttctcgagacgagcgatcgctttgtgagattccggatgtg

SEQ ID NO: 41630 - DNA, 41 bp, Emericella nidulans
gaattcactgcggccgccatgagccactgcgccattggacc

SEQ ID NO: 41631 - DNA, 47 bp, Emericella nidulans
gttctcgagacgagcgatcgcggatagagggacatcatcctcgtggc

SEQ ID NO: 41632 - DNA, 49 bp, Emericella nidulans
gaattcactgcggccgccatggatgctgatcaagaggtaacgtcgtggc

SEQ ID NO: 41633 - DNA, 46 bp, Emericella nidulans
gttctcgagacgagcgatcgcagtgagctcctccaagctacgtcca

SEQ ID NO: 41634 - DNA, 46 bp, Emericella nidulans
gaattcactgcggccgccatgggccgttcggtatgttgtttcaagc

SEQ ID NO: 41635 - DNA, 41 bp, Emericella nidulans
gttctcgagacgagcgatcgccttgccggggctgtcaatgg

SEQ ID NO: 41636 - DNA, 41 bp, Emericella nidulans
gaattcactgcggccgccatgttccaggcgctaatgctagt

SEQ ID NO: 41637 - DNA, 46 bp, Emericella nidulans
gttctcgagacgagcgatcgcgatatgaccatcaagtcgtaagttg

SEQ ID NO: 41638 - DNA, 41 bp, Emericella nidulans
gaattcactgcggccgccatgccgaccgtccgccatctagg

SEQ ID NO: 41639 - DNA, 49 bp, Emericella nidulans
gttctcgagacgagcgatcgcagagctttccctttccttctttaattcc

SEQ ID NO: 41640 - DNA, 41 bp, Emericella nidulans
gaattcactgcggccgccatgggtggaactggtggatgaaa

SEQ ID NO: 41641 - DNA, 41 bp, Emericella nidulans
gttctcgagacgagcgatcgctggccattttgatatcctga

SEQ ID NO: 41642 - DNA, 40 bp, Emericella nidulans
gaattcactgcggccgccatgtgctgaggcagaaagactc

SEQ ID NO: 41643 - DNA, 41 bp, Emericella nidulans
gttctcgagacgagcgatcgcgtttgccctgacatccaagt

SEQ ID NO: 41644 - DNA, 44 bp, Emericella nidulans
gaattcactgcggccgccatggcccgtcgctttatctcggcttc

SEQ ID NO: 41645 - DNA, 40 bp, Emericella nidulans
gttctcgagacgagcgatcgccgggagcacgacgcagacc

SEQ ID NO: 41646 - DNA, 46 bp, Emericella nidulans
gaattcactgcggccgccatgccacacatatatgccgtcgccagag

SEQ ID NO: 41647 - DNA, 49 bp, Emericella nidulans
gttctcgagacgagcgatcgcgatatacaccgaaagcttccctgtcacc

SEQ ID NO: 41648 - DNA, 48 bp, Emericella nidulans
gaattcactgcggccgccatgcgactagaactccagctatacccctca

SEQ ID NO: 41649 - DNA, 45 bp, Emericella nidulans
gttctcgagacgagcgatcgcctcttgcctcctctccttcccttc

SEQ ID NO: 41650 - DNA, 49 bp, Emericella nidulans
gaattcactgcggccgccatgagcagtgaccaatatgcaaacggaattg

SEQ ID NO: 41651 - DNA, 41 bp, Emericella nidulans
gttctcgagacgagcgatcgcagcggtgatggcgaccaagg

SEQ ID NO: 41652 - DNA, 45 bp, Emericella nidulans
gaattcactgcggccgccatgacgatacccttcgccgagtcttcg

SEQ ID NO: 41653 - DNA, 41 bp, Emericella nidulans
gttctcgagacgagcgatcgcctgattcagcgcggcccgta

SEQ ID NO: 41654 - DNA, 43 bp, Emericella nidulans
gaattcactgcggccgccatgtcatggccatggacacgtcgtt

SEQ ID NO: 41655 - DNA, 48 bp, Emericella nidulans
gttctcgagacgagcgatcgcgtactgtgtccgtcatctggagattca

SEQ ID NO: 41656 - DNA, 44 bp, Emericella nidulans
gaattcactgcggccgccatgtcatcaaatagaaagagtggtcc

SEQ ID NO: 41657 - DNA, 46 bp, Emericella nidulans
gttctcgagacgagcgatcgcgtaggtaatgaagtagaggtagctg

SEQ ID NO: 41658 - DNA, 49 bp, Emericella nidulans
gaattcactgcggccgccatgtgctatcaactttgctttctttgtttgc

SEQ ID NO: 41659 - DNA, 48 bp, Emericella nidulans
gttctcgagacgagcgatcgcagcatgtcgaagtagagagacggattg

SEQ ID NO: 41660 - DNA, 41 bp, Emericella nidulans
gaattcactgcggccgccatgttctgttcagcgagacgaaa

SEQ ID NO: 41661 - DNA, 39 bp, Emericella nidulans
gttctcgagacgagcgatcgccaaagcctttgtggattg

SEQ ID NO: 41662 - DNA, 49 bp, Emericella nidulans
gaattcactgcggccgccatgagccagtcttctataccctaaccgctct

SEQ ID NO: 41663 - DNA, 49 bp, Emericella nidulans
gttctcgagacgagcgatcgcctttcttcagggcagagccagccagctt

SEQ ID NO: 41664 - DNA, 48 bp, Emericella nidulans
gaattcactgcggccgccatgagtcgccagaggataaagagccagttg

SEQ ID NO: 41665 - DNA, 47 bp, Emericella nidulans
gttctcgagacgagcgatcgccccttgttcctgaatgatcatgtgct

SEQ ID NO: 41666 - DNA, 45 bp, Emericella nidulans
gaattcactgcggccgccatggatggatgagctcaaggccgagtc

SEQ ID NO: 41667 - DNA, 41 bp, Emericella nidulans
gttctcgagacgagcgatcgccacccagagcccctccacca

SEQ ID NO: 41668 - DNA, 49 bp, Emericella nidulans
gaattcactgcggccgccatgtcctagtgatcctaacacagcaggcaaa

SEQ ID NO: 41669 - DNA, 41 bp, Emericella nidulans
gttctcgagacgagcgatcgctcgcgatccgtttcgggttg

SEQ ID NO: 41670 - DNA, 41 bp, Emericella nidulans
gaattcactgcggccgccatgtcacctacgcagagaggagc

SEQ ID NO: 41671 - DNA, 49 bp, Emericella nidulans
gttctcgagacgagcgatcgcattcatctttcttaagaccaattgtacg

SEQ ID NO: 41672 - DNA, 42 bp, Emericella nidulans
gaattcactgcggccgccatgcgcggatacgtcaccgcattc

SEQ ID NO: 41673 - DNA, 45 bp, Emericella nidulans
gttctcgagacgagcgatcgcagagcgattgagcatgtacggtga

SEQ ID NO: 41674 - DNA, 43 bp, Emericella nidulans
gaattcactgcggccgccatggccctctgtcgtccgcattctc

SEQ ID NO: 41675 - DNA, 49 bp, Emericella nidulans
gttctcgagacgagcgatcgcacacggcattaagcacttattttgtacg

SEQ ID NO: 41676 - DNA, 47 bp, Emericella nidulans
gaattcactgcggccgccatgccctataccctatgaactaacacaaa

SEQ ID NO: 41677 - DNA, 40 bp, Emericella nidulans
gttctcgagacgagcgatcgccgaggtctggtcatcatcg

SEQ ID NO: 41678 - DNA, 41 bp, Emericella nidulans
gaattcactgcggccgccatgccatgggatctgttcctcaa

SEQ ID NO: 41679 - DNA, 41 bp, Emericella nidulans
gttctcgagacgagcgatcgcagtgctgtcccatccagaag

SEQ ID NO: 41680 - DNA, 41 bp, Emericella nidulans
gaattcactgcggccgccatgcaggtgctcaagaccaacaa

SEQ ID NO: 41681 - DNA, 44 bp, Emericella nidulans
gttctcgagacgagcgatcgctcttggagataatatgatgtggc

SEQ ID NO: 41682 - DNA, 48 bp, Emericella nidulans
gaattcactgcggccgccatgcaacaaggccaacattggctacttctc

SEQ ID NO: 41683 - DNA, 49 bp, Emericella nidulans
gttctcgagacgagcgatcgctaaaggataatctggggacgtaaaggga

SEQ ID NO: 41684 - DNA, 41 bp, Emericella nidulans
gaattcactgcggccgccatgggatccccagcaacggctca

SEQ ID NO: 41685 - DNA, 49 bp, Emericella nidulans
gttctcgagacgagcgatcgccaggccttttacagagcctaaagctaaa

SEQ ID NO: 41686 - DNA, 41 bp, Emericella nidulans
gaattcactgcggccgccatgtggccggcggtatccgatct

SEQ ID NO: 41687 - DNA, 45 bp, Emericella nidulans
gttctcgagacgagcgatcgcgagacaggcgttgatgatgagctg

SEQ ID NO: 41688 - DNA, 48 bp, Emericella nidulans
gaattcactgcggccgccatgatgcgattatttgtggtcccaatctcc

SEQ ID NO: 41689 - DNA, 41 bp, Emericella nidulans
gttctcgagacgagcgatcgccgccagtgcgaccagcctct

SEQ ID NO: 41690 - DNA, 46 bp, Emericella nidulans
gaattcactgcggccgccatgctttccaccgccttacatttgaaac

SEQ ID NO: 41691 - DNA, 41 bp, Emericella nidulans
gttctcgagacgagcgatcgctcctcgcccgcgtcttgttc

SEQ ID NO: 41692 - DNA, 41 bp, Emericella nidulans
gaattcactgcggccgccatgtcgttcgactagcccaaaat

SEQ ID NO: 41693 - DNA, 43 bp, Emericella nidulans
gttctcgagacgagcgatcgccctccctcaaactagtctcaaa

SEQ ID NO: 41694 - DNA, 41 bp, Emericella nidulans
gaattcactgcggccgccatggatgttgaaggcgtccagtc

SEQ ID NO: 41695 - DNA, 44 bp, Emericella nidulans
gttctcgagacgagcgatcgcgcctcgatcatatcttgattaca

SEQ ID NO: 41696 - DNA, 41 bp, Emericella nidulans
gaattcactgcggccgccatgccaaggccatcagaagtctc

SEQ ID NO: 41697 - DNA, 41 bp, Emericella nidulans
gttctcgagacgagcgatcgcagatccaaccgctcctcttt

SEQ ID NO: 41698 - DNA, 48 bp, Emericella nidulans
gaattcactgcggccgccatgagcagtgggaaaggtgactacgtgagc

SEQ ID NO: 41699 - DNA, 47 bp, Emericella nidulans
gttctcgagacgagcgatcgcgatggaaacttcgcactgccgcgata

SEQ ID NO: 41700 - DNA, 39 bp, Emericella nidulans
gaattcactgcggccgccatggacttccgcaaccccttt

SEQ ID NO: 41701 - DNA, 43 bp, Emericella nidulans
gttctcgagacgagcgatcgccgtgttgaggaatttaaagacg

SEQ ID NO: 41702 - DNA, 49 bp, Emericella nidulans
gaattcactgcggccgccatgaaagagagattagacggcgtaaaggaga

SEQ ID NO: 41703 - DNA, 43 bp, Emericella nidulans
gttctcgagacgagcgatcgctactccgggcttgcgcggcttc

SEQ ID NO: 41704 - DNA, 41 bp, Emericella nidulans
gaattcactgcggccgccatgcggcacgcgtgctgaggtag

SEQ ID NO: 41705 - DNA, 44 bp, Emericella nidulans
gttctcgagacgagcgatcgccattcggagctgagcgacttcaa

SEQ ID NO: 41706 - DNA, 42 bp, Emericella nidulans
gaattcactgcggccgccatgaaagcctcagcttgcgagtcc

SEQ ID NO: 41707 - DNA, 41 bp, Emericella nidulans
gttctcgagacgagcgatcgccgaatgccgactcggggaac

SEQ ID NO: 41708 - DNA, 47 bp, Emericella nidulans
gaattcactgcggccgccatgcacagcaacctctccttacgtgattc

SEQ ID NO: 41709 - DNA, 41 bp, Emericella nidulans
gttctcgagacgagcgatcgccgccagagccatcgagagca

SEQ ID NO: 41710 - DNA, 41 bp, Emericella nidulans
gaattcactgcggccgccatgtcccatattttggctctcgt

SEQ ID NO: 41711 - DNA, 41 bp, Emericella nidulans
gttctcgagacgagcgatcgccgatcctctcggtttcttca

SEQ ID NO: 41712 - DNA, 41 bp, Emericella nidulans
gaattcactgcggccgccatgattcccaactcacccaacac

SEQ ID NO: 41713 - DNA, 41 bp, Emericella nidulans
gttctcgagacgagcgatcgccgtgtacggttctcatgtgc

SEQ ID NO: 41714 - DNA, 41 bp, Emericella nidulans
gaattcactgcggccgccatgcggagcagcacgtcgcattt

SEQ ID NO: 41715 - DNA, 42 bp, Emericella nidulans
gttctcgagacgagcgatcgctgcgcaattcatccaactccc

SEQ ID NO: 41716 - DNA, 41 bp, Emericella nidulans
gaattcactgcggccgccatggcggatggcgctgttgacct

SEQ ID NO: 41717 - DNA, 43 bp, Emericella nidulans
gttctcgagacgagcgatcgccatcccagcaccaacaagcaca

SEQ ID NO: 41718 - DNA, 45 bp, Emericella nidulans
gaattcactgcggccgccatgtccccgattactcatccagccata

SEQ ID NO: 41719 - DNA, 41 bp, Emericella nidulans
gttctcgagacgagcgatcgcccgaacagccagtcggcaca

SEQ ID NO: 41720 - DNA, 41 bp, Emericella nidulans
gaattcactgcggccgccatgaacagcgttaccgccattac

SEQ ID NO: 41721 - DNA, 41 bp, Emericella nidulans
gttctcgagacgagcgatcgcaccaattcggagcatcaaag

SEQ ID NO: 41722 - DNA, 46 bp, Emericella nidulans
gaattcactgcggccgccatgtgatttgatctagggacaggccatc

SEQ ID NO: 41723 - DNA, 48 bp, Emericella nidulans
gttctcgagacgagcgatcgcggtgaagataacctaggcagcattgtt

SEQ ID NO: 41724 - DNA, 41 bp, Emericella nidulans
gaattcactgcggccgccatgtctgctggcgcttgccttcc

SEQ ID NO: 41725 - DNA, 41 bp, Emericella nidulans
gttctcgagacgagcgatcgccgcccgcgttgttgatgaga

SEQ ID NO: 41726 - DNA, 42 bp, Emericella nidulans
gaattcactgcggccgccatgcggctcttcaccgctcgttcc

SEQ ID NO: 41727 - DNA, 41 bp, Emericella nidulans
gttctcgagacgagcgatcgccgccataccgtctccggcac

SEQ ID NO: 41728 - DNA, 41 bp, Emericella nidulans
gaattcactgcggccgccatggaaatgcccagctaatccag

SEQ ID NO: 41729 - DNA, 44 bp, Emericella nidulans
gttctcgagacgagcgatcgcgataatagtatgcgtcgtcttcg

SEQ ID NO: 41730 - DNA, 49 bp, Emericella nidulans
gaattcactgcggccgccatgtattcaccactatgtatggcgagatatt

SEQ ID NO: 41731 - DNA, 41 bp, Emericella nidulans
gttctcgagacgagcgatcgcgcgagaagggcgtaatcttt

SEQ ID NO: 41732 - DNA, 41 bp, Emericella nidulans
gaattcactgcggccgccatgaatcttccctccgtcgactt

SEQ ID NO: 41733 - DNA, 41 bp, Emericella nidulans
gttctcgagacgagcgatcgcccgaccatctcagcttcttc

SEQ ID NO: 41734 - DNA, 41 bp, Emericella nidulans
gaattcactgcggccgccatgccgcgtcgcgattgaaggtt

SEQ ID NO: 41735 - DNA, 41 bp, Emericella nidulans
gttctcgagacgagcgatcgcgctggacggaagccgcaaac

SEQ ID NO: 41736 - DNA, 41 bp, Emericella nidulans
gaattcactgcggccgccatgggcggtgctgcgacaaacat

SEQ ID NO: 41737 - DNA, 49 bp, Emericella nidulans
gttctcgagacgagcgatcgcggcttgagctatattccacatctccttg

SEQ ID NO: 41738 - DNA, 45 bp, Emericella nidulans
gaattcactgcggccgccatgacaatctctgacttgttcgatgtt

SEQ ID NO: 41739 - DNA, 41 bp, Emericella nidulans
gttctcgagacgagcgatcgcggtctgcggtctctggtaaa

SEQ ID NO: 41740 - DNA, 45 bp, Emericella nidulans
gaattcactgcggccgccatgcactctcgttcccacctcagagcc

SEQ ID NO: 41741 - DNA, 43 bp, Emericella nidulans
gttctcgagacgagcgatcgcgtgacggaagccgtgtagtgcc

SEQ ID NO: 41742 - DNA, 41 bp, Emericella nidulans
gaattcactgcggccgccatgagttgttgcggccggaggtg

SEQ ID NO: 41743 - DNA, 45 bp, Emericella nidulans
gttctcgagacgagcgatcgccgcgatctcctcaggcttcttctc

SEQ ID NO: 41744 - DNA, 43 bp, Emericella nidulans
gaattcactgcggccgccatgcgacagtgggccactggcagat

SEQ ID NO: 41745 - DNA, 44 bp, Emericella nidulans
gttctcgagacgagcgatcgctgacccgctgaatccatttctcg

SEQ ID NO: 41746 - DNA, 44 bp, Emericella nidulans
gaattcactgcggccgccatgtgtcctatactttggaggaaacc

SEQ ID NO: 41747 - DNA, 41 bp, Emericella nidulans
gttctcgagacgagcgatcgcaacatcgaccatagcccttg

SEQ ID NO: 41748 - DNA, 45 bp, Emericella nidulans
gaattcactgcggccgccatggccatcctgttactgggccgtggt

SEQ ID NO: 41749 - DNA, 49 bp, Emericella nidulans
gttctcgagacgagcgatcgcataatccgagctttccagtcttcccaat

SEQ ID NO: 41750 - DNA, 41 bp, Emericella nidulans
gaattcactgcggccgccatgtgttctggagcaaagtgtgg

SEQ ID NO: 41751 - DNA, 44 bp, Emericella nidulans
gttctcgagacgagcgatcgccgtacccttactctgcaagaatc

SEQ ID NO: 41752 - DNA, 49 bp, Emericella nidulans
gaattcactgcggccgccatgctgaccctttatatagaccggcgtaatc

SEQ ID NO: 41753 - DNA, 41 bp, Emericella nidulans
gttctcgagacgagcgatcgccggggatgcgtgcgaatcat

SEQ ID NO: 41754 - DNA, 41 bp, Emericella nidulans
gaattcactgcggccgccatggcgatcttaagccggagaat

SEQ ID NO: 41755 - DNA, 41 bp, Emericella nidulans
gttctcgagacgagcgatcgcgtgtaatgaacgggtggagc

SEQ ID NO: 41756 - DNA, 41 bp, Emericella nidulans
gaattcactgcggccgccatgggcggagagggcggattctg

SEQ ID NO: 41757 - DNA, 42 bp, Emericella nidulans
gttctcgagacgagcgatcgcggtcgctggcagctccaagaa

SEQ ID NO: 41758 - DNA, 42 bp, Emericella nidulans
gaattcactgcggccgccatgtgccacgttcatcggctacgg

SEQ ID NO: 41759 - DNA, 46 bp, Emericella nidulans
gttctcgagacgagcgatcgccgacgcattcgaagttgtcctcttg

SEQ ID NO: 41760 - DNA, 47 bp, Emericella nidulans
gaattcactgcggccgccatgcttgatggcattacttggtgaaatga

SEQ ID NO: 41761 - DNA, 41 bp, Emericella nidulans
gttctcgagacgagcgatcgcccgttcgcgtgcgactcgtt

SEQ ID NO: 41762 - DNA, 41 bp, Emericella nidulans
gaattcactgcggccgccatggctggcatggtcgcaccaga

SEQ ID NO: 41763 - DNA, 47 bp, Emericella nidulans
gttctcgagacgagcgatcgcgtggtctagttcttcctcggtgtcaa

SEQ ID NO: 41764 - DNA, 43 bp, Emericella nidulans
gaattcactgcggccgccatgggaccttgcctgcgacgtcttc

SEQ ID NO: 41765 - DNA, 41 bp, Emericella nidulans
gttctcgagacgagcgatcgcgtgcgtgcatggaccgcttc

SEQ ID NO: 41766 - DNA, 42 bp, Emericella nidulans
gaattcactgcggccgccatgccccatacaaacacgcacacc

SEQ ID NO: 41767 - DNA, 41 bp, Emericella nidulans
gttctcgagacgagcgatcgctcgccatgtaagcccactgc

SEQ ID NO: 41768 - DNA, 44 bp, Emericella nidulans
gaattcactgcggccgccatggcgcgcatctcaatgtgagttct

SEQ ID NO: 41769 - DNA, 48 bp, Emericella nidulans
gttctcgagacgagcgatcgccaaacagggaggtaacaactgtcttca

SEQ ID NO: 41770 - DNA, 42 bp, Emericella nidulans
gaattcactgcggccgccatggcggtgtcgatgaaggcctga

SEQ ID NO: 41771 - DNA, 43 bp, Emericella nidulans
gttctcgagacgagcgatcgccccaggtacacgaagccggtga

SEQ ID NO: 41772 - DNA, 45 bp, Emericella nidulans
gaattcactgcggccgccatgtgtcgcagttcgctagttctaccc

SEQ ID NO: 41773 - DNA, 49 bp, Emericella nidulans
gttctcgagacgagcgatcgcataccacgagcttctgcctggcatgctt

SEQ ID NO: 41774 - DNA, 49 bp, Emericella nidulans
gaattcactgcggccgccatgtacaatattatgccaacagacgggttgc

SEQ ID NO: 41775 - DNA, 49 bp, Emericella nidulans
gttctcgagacgagcgatcgcctgactaacctctaagtcctgggtcacg

SEQ ID NO: 41776 - DNA, 41 bp, Emericella nidulans
gaattcactgcggccgccatggccatggcaatactgatgaa

SEQ ID NO: 41777 - DNA, 45 bp, Emericella nidulans
gttctcgagacgagcgatcgcctttagagaatccggtatttgttt

SEQ ID NO: 41778 - DNA, 41 bp, Emericella nidulans
gaattcactgcggccgccatgagagcgcggtctgagcatcg

SEQ ID NO: 41779 - DNA, 44 bp, Emericella nidulans
gttctcgagacgagcgatcgctgccaatatttcaccacgctacc

SEQ ID NO: 41780 - DNA, 41 bp, Emericella nidulans
gaattcactgcggccgccatgcggacccagaagtagcagag

SEQ ID NO: 41781 - DNA, 43 bp, Emericella nidulans
gttctcgagacgagcgatcgcagtcaaatccctcctctaggtt

SEQ ID NO: 41782 - DNA, 49 bp, Emericella nidulans
gaattcactgcggccgccatgtatttatagtagtgcccctgctgttgct

SEQ ID NO: 41783 - DNA, 41 bp, Emericella nidulans
gttctcgagacgagcgatcgccagccctgggggtgcatgat

SEQ ID NO: 41784 - DNA, 47 bp, Emericella nidulans
gaattcactgcggccgccatggaccagtggtttcgcttcataattcc

SEQ ID NO: 41785 - DNA, 49 bp, Emericella nidulans
gttctcgagacgagcgatcgcaaaagaagcaccagctgtagacttacca

SEQ ID NO: 41786 - DNA, 41 bp, Emericella nidulans
gaattcactgcggccgccatgacgggcagcaggccctaacc

SEQ ID NO: 41787 - DNA, 48 bp, Emericella nidulans
gttctcgagacgagcgatcgctctctgtgatatggccaacagtgggat

SEQ ID NO: 41788 - DNA, 49 bp, Emericella nidulans
gaattcactgcggccgccatgattgaactatgctgattggacaggcaca

SEQ ID NO: 41789 - DNA, 40 bp, Emericella nidulans
gttctcgagacgagcgatcgcccgggcgtcaagcccaagt

SEQ ID NO: 41790 - DNA, 41 bp, Emericella nidulans
gaattcactgcggccgccatgtgctgggcgcttccttcgtc

SEQ ID NO: 41791 - DNA, 41 bp, Emericella nidulans
gttctcgagacgagcgatcgctcggcctcaccattgccctc

SEQ ID NO: 41792 - DNA, 41 bp, Emericella nidulans
gaattcactgcggccgccatgcggcgctttcctcgcgtacc

SEQ ID NO: 41793 - DNA, 41 bp, Emericella nidulans
gttctcgagacgagcgatcgcgttcgcccgagggcacaatc

SEQ ID NO: 41794 - DNA, 41 bp, Emericella nidulans
gaattcactgcggccgccatgatgccttcgaattcatcgac

SEQ ID NO: 41795 - DNA, 40 bp, Emericella nidulans
gttctcgagacgagcgatcgccccgaatgagagtggaggt

SEQ ID NO: 41796 - DNA, 44 bp, Emericella nidulans
gaattcactgcggccgccatgcatggtccgctagatgacgagga

SEQ ID NO: 41797 - DNA, 41 bp, Emericella nidulans
gttctcgagacgagcgatcgcgcgcaactcgttcccgttcc

SEQ ID NO: 41798 - DNA, 49 bp, Emericella nidulans
gaattcactgcggccgccatgtagatctgctgctaaacctcaccattgc

SEQ ID NO: 41799 - DNA, 49 bp, Emericella nidulans
gttctcgagacgagcgatcgctatagagcagtcagagccacaatgcaaa

SEQ ID NO: 41800 - DNA, 41 bp, Emericella nidulans
gaattcactgcggccgccatgccatctggtcgtggagtagg

SEQ ID NO: 41801 - DNA, 41 bp, Emericella nidulans
gttctcgagacgagcgatcgcctgcttggtgtgtgagcaag

SEQ ID NO: 41802 - DNA, 41 bp, Emericella nidulans
gaattcactgcggccgccatggccgagcccctatcccaacc

SEQ ID NO: 41803 - DNA, 41 bp, Emericella nidulans
gttctcgagacgagcgatcgccgggcgaggagctcaagcct

SEQ ID NO: 41804 - DNA, 41 bp, Emericella nidulans
gaattcactgcggccgccatgtgatccccgccaaagctccc

SEQ ID NO: 41805 - DNA, 45 bp, Emericella nidulans
gttctcgagacgagcgatcgcagtagacactgccagaacggagga

SEQ ID NO: 41806 - DNA, 41 bp, Emericella nidulans
gaattcactgcggccgccatgacgcctcaacatcgccctcc

SEQ ID NO: 41807 - DNA, 41 bp, Emericella nidulans
gttctcgagacgagcgatcgcacaccgactgcccacgcacc

SEQ ID NO: 41808 - DNA, 46 bp, Emericella nidulans
gaattcactgcggccgccatgctaaaggtagaggccgccaaacgtg

SEQ ID NO: 41809 - DNA, 42 bp, Emericella nidulans
gttctcgagacgagcgatcgcggcgctggcttgttcttgacg

SEQ ID NO: 41810 - DNA, 44 bp, Emericella nidulans
gaattcactgcggccgccatgcagcaagtgctgcacctgagtgt

SEQ ID NO: 41811 - DNA, 41 bp, Emericella nidulans
gttctcgagacgagcgatcgcgcgtgcctggtctgcggaat

SEQ ID NO: 41812 - DNA, 41 bp, Emericella nidulans
gaattcactgcggccgccatggcatgtccggacgcttccct

SEQ ID NO: 41813 - DNA, 49 bp, Emericella nidulans
gttctcgagacgagcgatcgcgcttgagaattactacacccacgccctc

SEQ ID NO: 41814 - DNA, 47 bp, Emericella nidulans
gaattcactgcggccgccatgtgggaagagctgaagttcttgttgga

SEQ ID NO: 41815 - DNA, 49 bp, Emericella nidulans
gttctcgagacgagcgatcgcgcattattctcagatacagcctgcgact

SEQ ID NO: 41816 - DNA, 47 bp, Emericella nidulans
gaattcactgcggccgccatgctacgctatggagaacgccaaggaca

SEQ ID NO: 41817 - DNA, 41 bp, Emericella nidulans
gttctcgagacgagcgatcgcagccgccggggagtcatgta

SEQ ID NO: 41818 - DNA, 41 bp, Emericella nidulans
gaattcactgcggccgccatgtgcgcagctggagggtgaga

SEQ ID NO: 41819 - DNA, 49 bp, Emericella nidulans
gttctcgagacgagcgatcgctttggtttgcgtcaaaatgctagcgtca

SEQ ID NO: 41820 - DNA, 43 bp, Emericella nidulans
gaattcactgcggccgccatgcttagtgtccctcacaatgact

SEQ ID NO: 41821 - DNA, 40 bp, Emericella nidulans
gttctcgagacgagcgatcgcggcagggctgttgtaacct

SEQ ID NO: 41822 - DNA, 41 bp, Emericella nidulans
gaattcactgcggccgccatgagaaatggggcctttcaagt

SEQ ID NO: 41823 - DNA, 41 bp, Emericella nidulans
gttctcgagacgagcgatcgcggtgctcaagcaggattttc

SEQ ID NO: 41824 - DNA, 41 bp, Emericella nidulans
gaattcactgcggccgccatgaaatgaacggcacagtaagc

SEQ ID NO: 41825 - DNA, 41 bp, Emericella nidulans
gttctcgagacgagcgatcgccggtatcacaaacgcaaaga

SEQ ID NO: 41826 - DNA, 41 bp, Emericella nidulans
gaattcactgcggccgccatgtcgcgggaagctcggaagag

SEQ ID NO: 41827 - DNA, 46 bp, Emericella nidulans
gttctcgagacgagcgatcgcgcaacatcagatgcctgatcgtcct

SEQ ID NO: 41828 - DNA, 43 bp, Emericella nidulans
gaattcactgcggccgccatgcgccggcggtgtttattaccag

SEQ ID NO: 41829 - DNA, 41 bp, Emericella nidulans
gttctcgagacgagcgatcgcctcggcgagatcgggcatga

SEQ ID NO: 41830 - DNA, 41 bp, Emericella nidulans
gaattcactgcggccgccatgggcatcgtgcaggtcccctc

SEQ ID NO: 41831 - DNA, 49 bp, Emericella nidulans
gttctcgagacgagcgatcgctgcagattaatatgacccttttcggtga

SEQ ID NO: 41832 - DNA, 47 bp, Emericella nidulans
gaattcactgcggccgccatgtctctccatcgtcgttggtttaatgc

SEQ ID NO: 41833 - DNA, 47 bp, Emericella nidulans
gttctcgagacgagcgatcgcactcctccaacacagcctcaatctcc

SEQ ID NO: 41834 - DNA, 46 bp, Emericella nidulans
gaattcactgcggccgccatgagggaggtactgcaggaggagttga

SEQ ID NO: 41835 - DNA, 46 bp, Emericella nidulans
gttctcgagacgagcgatcgcgtcgaccttggcctgtgtgtttctg

SEQ ID NO: 41836 - DNA, 44 bp, Emericella nidulans
gaattcactgcggccgccatggcaccaaaggcggatcatctctg

SEQ ID NO: 41837 - DNA, 49 bp, Emericella nidulans
gttctcgagacgagcgatcgcgatggttttattctccagatcccggaag

SEQ ID NO: 41838 - DNA, 48 bp, Emericella nidulans
gaattcactgcggccgccatggggcctcgatgagaacttcttcttaaa

SEQ ID NO: 41839 - DNA, 49 bp, Emericella nidulans
gttctcgagacgagcgatcgccaatatactcgctactcgtgatcggttc

SEQ ID NO: 41840 - DNA, 46 bp, Emericella nidulans
gaattcactgcggccgccatggggggacttgtacctcaccaaatgc

SEQ ID NO: 41841 - DNA, 46 bp, Emericella nidulans
gttctcgagacgagcgatcgctgccaaactctcgaatgtaccaagt

SEQ ID NO: 41842 - DNA, 41 bp, Emericella nidulans
gaattcactgcggccgccatggtccttcgcggcacccttga

SEQ ID NO: 41843 - DNA, 41 bp, Emericella nidulans
gttctcgagacgagcgatcgctcccagccagcggagacgat

SEQ ID NO: 41844 - DNA, 44 bp, Emericella nidulans
gaattcactgcggccgccatgtgaatatccaacccccagccaaa

SEQ ID NO: 41845 - DNA, 41 bp, Emericella nidulans
gttctcgagacgagcgatcgcgggcgagggcgttactttca

SEQ ID NO: 41846 - DNA, 47 bp, Emericella nidulans
gaattcactgcggccgccatggtaccttctccagcttctccgaccca

SEQ ID NO: 41847 - DNA, 42 bp, Emericella nidulans
gttctcgagacgagcgatcgccagttgtgcgcacccgacttc

SEQ ID NO: 41848 - DNA, 41 bp, Emericella nidulans
gaattcactgcggccgccatggcatggcaacaaggtaggtt

SEQ ID NO: 41849 - DNA, 40 bp, Emericella nidulans
gttctcgagacgagcgatcgctccgagtacgctgatgagg

SEQ ID NO: 41850 - DNA, 41 bp, Emericella nidulans
gaattcactgcggccgccatgtggcgtcttcgccatcatcg

SEQ ID NO: 41851 - DNA, 45 bp, Emericella nidulans
gttctcgagacgagcgatcgccgattgccaaaatgacaggaagat

SEQ ID NO: 41852 - DNA, 41 bp, Emericella nidulans
gaattcactgcggccgccatgtttttgcccccggaagccac

SEQ ID NO: 41853 - DNA, 44 bp, Emericella nidulans
gttctcgagacgagcgatcgcccagacgcgactaccaaggacga

SEQ ID NO: 41854 - DNA, 48 bp, Emericella nidulans
gaattcactgcggccgccatgcagaagctctcgagaagtggtcggtgc

SEQ ID NO: 41855 - DNA, 49 bp, Emericella nidulans
gttctcgagacgagcgatcgcatgaggtggattattgttttagccatcc

SEQ ID NO: 41856 - DNA, 49 bp, Emericella nidulans
gaattcactgcggccgccatgggacaagtctctacctttgtcggcttga

SEQ ID NO: 41857 - DNA, 48 bp, Emericella nidulans
gttctcgagacgagcgatcgccagccatggtggtgattgtagagttgg

SEQ ID NO: 41858 - DNA, 41 bp, Emericella nidulans
gaattcactgcggccgccatgcctgagggaagagagctgac

SEQ ID NO: 41859 - DNA, 40 bp, Emericella nidulans
gttctcgagacgagcgatcgctcaacattctcccggttca

SEQ ID NO: 41860 - DNA, 41 bp, Emericella nidulans
gaattcactgcggccgccatggccacggcactagtctgatt

SEQ ID NO: 41861 - DNA, 39 bp, Emericella nidulans
gttctcgagacgagcgatcgcgtggtcgacgaaagtggc

SEQ ID NO: 41862 - DNA, 46 bp, Emericella nidulans
gaattcactgcggccgccatggacagtgcgtttaccatgtctttcg

SEQ ID NO: 41863 - DNA, 47 bp, Emericella nidulans
gttctcgagacgagcgatcgcgtagtcgtctccgcggctaataacct

SEQ ID NO: 41864 - DNA, 41 bp, Emericella nidulans
gaattcactgcggccgccatggctaacgcttatctgcacca

SEQ ID NO: 41865 - DNA, 47 bp, Emericella nidulans
gttctcgagacgagcgatcgccttcttcttcttcttcttcttcttcc

SEQ ID NO: 41866 - DNA, 44 bp, Emericella nidulans
gaattcactgcggccgccatgccgactcccagaccaaactgagc

SEQ ID NO: 41867 - DNA, 45 bp, Emericella nidulans
gttctcgagacgagcgatcgcgccttggtgtcgactgccttatca

SEQ ID NO: 41868 - DNA, 46 bp, Emericella nidulans
gaattcactgcggccgccatgcctttgaggaagccagtcacgcaat

SEQ ID NO: 41869 - DNA, 41 bp, Emericella nidulans
gttctcgagacgagcgatcgcgattccgtggtcccggtcat

SEQ ID NO: 41870 - DNA, 45 bp, Emericella nidulans
gaattcactgcggccgccatgggatgacacagtcacgagcgtcag

SEQ ID NO: 41871 - DNA, 44 bp, Emericella nidulans
gttctcgagacgagcgatcgcccgaattgtaccccattccgcta

SEQ ID NO: 41872 - DNA, 41 bp, Emericella nidulans
gaattcactgcggccgccatgcgcatcatacggtcgattta

SEQ ID NO: 41873 - DNA, 41 bp, Emericella nidulans
gttctcgagacgagcgatcgccgctcaacgtagattgtccc

SEQ ID NO: 41874 - DNA, 41 bp, Emericella nidulans
gaattcactgcggccgccatgtcccaacactcgtgtgactc

SEQ ID NO: 41875 - DNA, 45 bp, Emericella nidulans
gttctcgagacgagcgatcgcgcagattctgcagtatgtgaagtc

SEQ ID NO: 41876 - DNA, 41 bp, Emericella nidulans
gaattcactgcggccgccatggccaacgctgatggagctgt

SEQ ID NO: 41877 - DNA, 49 bp, Emericella nidulans
gttctcgagacgagcgatcgcatatcattcttctccttgtgtgaccacc

SEQ ID NO: 41878 - DNA, 41 bp, Emericella nidulans
gaattcactgcggccgccatgacagtgaccatgaccacgac

SEQ ID NO: 41879 - DNA, 42 bp, Emericella nidulans
gttctcgagacgagcgatcgcgggtataaccaggtccaggaa

SEQ ID NO: 41880 - DNA, 49 bp, Emericella nidulans
gaattcactgcggccgccatgaaaatattgaaagcagaagcgtccgaaa

SEQ ID NO: 41881 - DNA, 47 bp, Emericella nidulans
gttctcgagacgagcgatcgccacaatggacgatgtccaactgatga

SEQ ID NO: 41882 - DNA, 48 bp, Emericella nidulans
gaattcactgcggccgccatgtaaagtcctgcaccgaatctgcagtga

SEQ ID NO: 41883 - DNA, 44 bp, Emericella nidulans
gttctcgagacgagcgatcgcgcccagccaaggagtctctgagc

SEQ ID NO: 41884 - DNA, 49 bp, Emericella nidulans
gaattcactgcggccgccatgcgacggatgacctcaattcagtgcgaag

SEQ ID NO: 41885 - DNA, 39 bp, Emericella nidulans
gttctcgagacgagcgatcgccggcgcaccccacgtcct

SEQ ID NO: 41886 - DNA, 44 bp, Emericella nidulans
gaattcactgcggccgccatgtgggtaaaacctgtaaggtacga

SEQ ID NO: 41887 - DNA, 41 bp, Emericella nidulans
gttctcgagacgagcgatcgctagccaggagggttcatacg

SEQ ID NO: 41888 - DNA, 46 bp, Emericella nidulans
gaattcactgcggccgccatgttgccaaaaagtatggtgtgagctg

SEQ ID NO: 41889 - DNA, 49 bp, Emericella nidulans
gttctcgagacgagcgatcgcgtcaaagatatctcaaagccatgccagt

SEQ ID NO: 41890 - DNA, 49 bp, Emericella nidulans
gaattcactgcggccgccatgctcgattaccatttactttcggttgacg

SEQ ID NO: 41891 - DNA, 47 bp, Emericella nidulans
gttctcgagacgagcgatcgccttccaaaaaccgtctgatccccagt

SEQ ID NO: 41892 - DNA, 41 bp, Emericella nidulans
gaattcactgcggccgccatgttctcctcgaggcgggtgcc

SEQ ID NO: 41893 - DNA, 49 bp, Emericella nidulans
gttctcgagacgagcgatcgcgcttcaagatgtccattctctcggcttt

SEQ ID NO: 41894 - DNA, 41 bp, Emericella nidulans
gaattcactgcggccgccatggcccaagccttttccggtgg

SEQ ID NO: 41895 - DNA, 42 bp, Emericella nidulans
gttctcgagacgagcgatcgcaatacagcgccccagcgaacc

SEQ ID NO: 41896 - DNA, 41 bp, Emericella nidulans
gaattcactgcggccgccatgcgccctgtccttgttaagag

SEQ ID NO: 41897 - DNA, 47 bp, Emericella nidulans
gttctcgagacgagcgatcgccttgacttaagtatatggatgcaagg

SEQ ID NO: 41898 - DNA, 45 bp, Emericella nidulans
gaattcactgcggccgccatgcttttagcgagtgttattaagcag

SEQ ID NO: 41899 - DNA, 41 bp, Emericella nidulans
gttctcgagacgagcgatcgctctggcagaggtcgtaatcc

SEQ ID NO: 41900 - DNA, 41 bp, Emericella nidulans
gaattcactgcggccgccatgttgccatgagaaggaaggtc

SEQ ID NO: 41901 - DNA, 45 bp, Emericella nidulans
gttctcgagacgagcgatcgcaagcagaatattagccatttctcg

SEQ ID NO: 41902 - DNA, 44 bp, Emericella nidulans
gaattcactgcggccgccatggtatctcttcgccggtgccctca

SEQ ID NO: 41903 - DNA, 49 bp, Emericella nidulans
gttctcgagacgagcgatcgcagcccggtagagtgaacttaccgtctta

SEQ ID NO: 41904 - DNA, 44 bp, Emericella nidulans
gaattcactgcggccgccatgtgggaccgccacctattaggaca

SEQ ID NO: 41905 - DNA, 41 bp, Emericella nidulans
gttctcgagacgagcgatcgcgcgggacgcctgcagtgaat

SEQ ID NO: 41906 - DNA, 40 bp, Emericella nidulans
gaattcactgcggccgccatgactcgtcgagggcgagaat

SEQ ID NO: 41907 - DNA, 41 bp, Emericella nidulans
gttctcgagacgagcgatcgctgggatttgatgcagattca

SEQ ID NO: 41908 - DNA, 42 bp, Emericella nidulans
gaattcactgcggccgccatggcatcgcgtctctcccgtctc

SEQ ID NO: 41909 - DNA, 49 bp, Emericella nidulans
gttctcgagacgagcgatcgctgaaccatctaccctctctatgggcaac

SEQ ID NO: 41910 - DNA, 44 bp, Emericella nidulans
gaattcactgcggccgccatgatgtgggcagtggccttgattcc

SEQ ID NO: 41911 - DNA, 41 bp, Emericella nidulans
gttctcgagacgagcgatcgccgacgcgcgcaaagaagtca

SEQ ID NO: 41912 - DNA, 45 bp, Emericella nidulans
gaattcactgcggccgccatgaaaaataaaatgattgagtccaaa

SEQ ID NO: 41913 - DNA, 41 bp, Emericella nidulans
gttctcgagacgagcgatcgcccctgcgtaatggtcttgat

SEQ ID NO: 41914 - DNA, 46 bp, Emericella nidulans
gaattcactgcggccgccatgcccccgttttacttcatttcctaca

SEQ ID NO: 41915 - DNA, 44 bp, Emericella nidulans
gttctcgagacgagcgatcgccggccgtgctcataagcagatca

SEQ ID NO: 41916 - DNA, 41 bp, Emericella nidulans
gaattcactgcggccgccatggtggataatgccaacgctct

SEQ ID NO: 41917 - DNA, 41 bp, Emericella nidulans
gttctcgagacgagcgatcgccaggagacagccatcgtgta

SEQ ID NO: 41918 - DNA, 49 bp, Emericella nidulans
gaattcactgcggccgccatgtcaagtctgaaggagtactgcaaagagc

SEQ ID NO: 41919 - DNA, 47 bp, Emericella nidulans
gttctcgagacgagcgatcgcgtagcggctcagtgaatttggaatgg

SEQ ID NO: 41920 - DNA, 44 bp, Emericella nidulans
gaattcactgcggccgccatgcctcgagaaccgggcttagagga

SEQ ID NO: 41921 - DNA, 41 bp, Emericella nidulans
gttctcgagacgagcgatcgctagcagcgggggagcggagt

SEQ ID NO: 41922 - DNA, 42 bp, Emericella nidulans
gaattcactgcggccgccatgtctggtatcgtaggcatctcg

SEQ ID NO: 41923 - DNA, 39 bp, Emericella nidulans
gttctcgagacgagcgatcgcgacgttggcccgcttaac

SEQ ID NO: 41924 - DNA, 41 bp, Emericella nidulans
gaattcactgcggccgccatgtaccagttccacgtcgatga

SEQ ID NO: 41925 - DNA, 41 bp, Emericella nidulans
gttctcgagacgagcgatcgcatgcagatgcgaggagaatc

SEQ ID NO: 41926 - DNA, 49 bp, Emericella nidulans
gaattcactgcggccgccatgagtgattctaccgtcatctcatctgtcc

SEQ ID NO: 41927 - DNA, 49 bp, Emericella nidulans
gttctcgagacgagcgatcgcccgcttttctctttgtcaaagccgtcca

SEQ ID NO: 41928 - DNA, 48 bp, Emericella nidulans
gaattcactgcggccgccatgacagttccctactaccgagaccttcac

SEQ ID NO: 41929 - DNA, 49 bp, Emericella nidulans
gttctcgagacgagcgatcgcatcactgatgccgcagtcgtgaatgatg

SEQ ID NO: 41930 - DNA, 49 bp, Emericella nidulans
gaattcactgcggccgccatgaacgataatatccacgcgtggccagagg

SEQ ID NO: 41931 - DNA, 48 bp, Emericella nidulans
gttctcgagacgagcgatcgcagttccttgggatgttcttcactttga

SEQ ID NO: 41932 - DNA, 46 bp, Emericella nidulans
gaattcactgcggccgccatgctcgagaggatctacattcgggacc

SEQ ID NO: 41933 - DNA, 40 bp, Emericella nidulans
gttctcgagacgagcgatcgcaagccggcgttcgctgtca

SEQ ID NO: 41934 - DNA, 42 bp, Emericella nidulans
gaattcactgcggccgccatgtgcgcgagcgaagagaattgc

SEQ ID NO: 41935 - DNA, 41 bp, Emericella nidulans
gttctcgagacgagcgatcgcccgcgctcgatccgactgtt

SEQ ID NO: 41936 - DNA, 47 bp, Emericella nidulans
gaattcactgcggccgccatggcggaagatgtgagaccatttgttga

SEQ ID NO: 41937 - DNA, 41 bp, Emericella nidulans
gttctcgagacgagcgatcgcccgtacgtcatcgccaggga

SEQ ID NO: 41938 - DNA, 42 bp, Emericella nidulans
gaattcactgcggccgccatgtcctcctgtacaagctctgct

SEQ ID NO: 41939 - DNA, 39 bp, Emericella nidulans
gttctcgagacgagcgatcgcgcttttcgtctcgtgcaa

SEQ ID NO: 41940 - DNA, 47 bp, Emericella nidulans
gaattcactgcggccgccatggaattttctgcttcttccggcccatc

SEQ ID NO: 41941 - DNA, 41 bp, Emericella nidulans
gttctcgagacgagcgatcgcgccgcccatgctcatcagtg

SEQ ID NO: 41942 - DNA, 49 bp, Emericella nidulans
gaattcactgcggccgccatgaggatatgttgtttacagtctccggtcc

SEQ ID NO: 41943 - DNA, 41 bp, Emericella nidulans
gttctcgagacgagcgatcgcacccgcggtctgctcagctc

SEQ ID NO: 41944 - DNA, 44 bp, Emericella nidulans
gaattcactgcggccgccatgctggacttcgtcagaaagcagga

SEQ ID NO: 41945 - DNA, 45 bp, Emericella nidulans
gttctcgagacgagcgatcgcgaatcggtggcctctcaaaagatg

SEQ ID NO: 41946 - DNA, 41 bp, Emericella nidulans
gaattcactgcggccgccatgataatgcgccattttccgta

SEQ ID NO: 41947 - DNA, 41 bp, Emericella nidulans
gttctcgagacgagcgatcgctgggtacgcggacttctaac

SEQ ID NO: 41948 - DNA, 41 bp, Emericella nidulans
gaattcactgcggccgccatgcgcagggcaagggctgaaga

SEQ ID NO: 41949 - DNA, 41 bp, Emericella nidulans
gttctcgagacgagcgatcgcacactcgcagcccgaccaca

SEQ ID NO: 41950 - DNA, 49 bp, Emericella nidulans
gaattcactgcggccgccatgcgagaaaagagataccctcatcgccatc

SEQ ID NO: 41951 - DNA, 49 bp, Emericella nidulans
gttctcgagacgagcgatcgccatcttcacagtcttagcggcggccttg

SEQ ID NO: 41952 - DNA, 44 bp, Emericella nidulans
gaattcactgcggccgccatgcggaccaccacgagacagaaagg

SEQ ID NO: 41953 - DNA, 45 bp, Emericella nidulans
gttctcgagacgagcgatcgcgttcaagctcgtccactgttgggt

SEQ ID NO: 41954 - DNA, 41 bp, Emericella nidulans
gaattcactgcggccgccatgcctggtccaggttcttgttc

SEQ ID NO: 41955 - DNA, 44 bp, Emericella nidulans
gttctcgagacgagcgatcgccagggagttaactaccccttttt

SEQ ID NO: 41956 - DNA, 43 bp, Emericella nidulans
gaattcactgcggccgccatgcacgatgctcccattgacacca

SEQ ID NO: 41957 - DNA, 41 bp, Emericella nidulans
gttctcgagacgagcgatcgctgcgcatgattcgccaggtt

SEQ ID NO: 41958 - DNA, 49 bp, Emericella nidulans
gaattcactgcggccgccatgcttgatgctcaatgttctcagtcatctt

SEQ ID NO: 41959 - DNA, 44 bp, Emericella nidulans
gttctcgagacgagcgatcgcgcgggaataaggtgcaggattca

SEQ ID NO: 41960 - DNA, 45 bp, Emericella nidulans
gaattcactgcggccgccatgtgcctacaattctgccctcgatcc

SEQ ID NO: 41961 - DNA, 45 bp, Emericella nidulans
gttctcgagacgagcgatcgcgtcggagaacttgtcgccgtaagc

SEQ ID NO: 41962 - DNA, 44 bp, Emericella nidulans
gaattcactgcggccgccatgccctacctcgacaggctcggttt

SEQ ID NO: 41963 - DNA, 46 bp, Emericella nidulans
gttctcgagacgagcgatcgctgctagcagatcccttcttcgcaac

SEQ ID NO: 41964 - DNA, 44 bp, Emericella nidulans
gaattcactgcggccgccatggggattctctgcctttgggatga

SEQ ID NO: 41965 - DNA, 41 bp, Emericella nidulans
gttctcgagacgagcgatcgctgagccagccgtgcttccag

SEQ ID NO: 41966 - DNA, 41 bp, Emericella nidulans
gaattcactgcggccgccatgggtccccggaacgaccttcg

SEQ ID NO: 41967 - DNA, 46 bp, Emericella nidulans
gttctcgagacgagcgatcgccccattatcagcacatgtgaacggt

SEQ ID NO: 41968 - DNA, 49 bp, Emericella nidulans
gaattcactgcggccgccatgaccaaactaaaaggctttcaaaacaggt

SEQ ID NO: 41969 - DNA, 43 bp, Emericella nidulans
gttctcgagacgagcgatcgcccgctcgctgcagctttagcat

SEQ ID NO: 41970 - DNA, 43 bp, Emericella nidulans
gaattcactgcggccgccatgggactggcaggctggagatgga

SEQ ID NO: 41971 - DNA, 43 bp, Emericella nidulans
gttctcgagacgagcgatcgccccctctccgctcgcttattgg

SEQ ID NO: 41972 - DNA, 48 bp, Emericella nidulans
gaattcactgcggccgccatgaaagcagaacaagggtgacacagtaga

SEQ ID NO: 41973 - DNA, 43 bp, Emericella nidulans
gttctcgagacgagcgatcgccgccgcgaagtttacgctcgat

SEQ ID NO: 41974 - DNA, 42 bp, Emericella nidulans
gaattcactgcggccgccatgccagatgggtataccgaaagc

SEQ ID NO: 41975 - DNA, 44 bp, Emericella nidulans
gttctcgagacgagcgatcgcttgtcctgcactttggtaatatg

SEQ ID NO: 41976 - DNA, 46 bp, Emericella nidulans
gaattcactgcggccgccatgccgtcaaagcatccactacagtgcc

SEQ ID NO: 41977 - DNA, 41 bp, Emericella nidulans
gttctcgagacgagcgatcgcgctggccccggggttagtga

SEQ ID NO: 41978 - DNA, 45 bp, Emericella nidulans
gaattcactgcggccgccatggatacgcacaagcaaatgcggaca

SEQ ID NO: 41979 - DNA, 41 bp, Emericella nidulans
gttctcgagacgagcgatcgccctgccaaccgccttgcatc

SEQ ID NO: 41980 - DNA, 41 bp, Emericella nidulans
gaattcactgcggccgccatgcagaccgggcatgtttatct

SEQ ID NO: 41981 - DNA, 41 bp, Emericella nidulans
gttctcgagacgagcgatcgcctgacggataacagctcgaa

SEQ ID NO: 41982 - DNA, 42 bp, Emericella nidulans
gaattcactgcggccgccatgtccgagagccaagtcctcgac

SEQ ID NO: 41983 - DNA, 41 bp, Emericella nidulans
gttctcgagacgagcgatcgccccgaaacactgccgcttgc

SEQ ID NO: 41984 - DNA, 42 bp, Emericella nidulans
gaattcactgcggccgccatggagctgggcgttgcaggatct

SEQ ID NO: 41985 - DNA, 41 bp, Emericella nidulans
gttctcgagacgagcgatcgcagcccgttcctgctcggtgt

SEQ ID NO: 41986 - DNA, 41 bp, Emericella nidulans
gaattcactgcggccgccatgcgcgctgatcgatggctggt

SEQ ID NO: 41987 - DNA, 43 bp, Emericella nidulans
gttctcgagacgagcgatcgctggaatggaagtgtgctgacga

SEQ ID NO: 41988 - DNA, 42 bp, Emericella nidulans
gaattcactgcggccgccatgtgactgcgtccgaagccaatg

SEQ ID NO: 41989 - DNA, 41 bp, Emericella nidulans
gttctcgagacgagcgatcgcccacctgcggccctctgtct

SEQ ID NO: 41990 - DNA, 41 bp, Emericella nidulans
gaattcactgcggccgccatgtcgggctgcggcaaaacaac

SEQ ID NO: 41991 - DNA, 49 bp, Emericella nidulans
gttctcgagacgagcgatcgcgagggatgggatatccaatacttccaaa

SEQ ID NO: 41992 - DNA, 49 bp, Emericella nidulans
gaattcactgcggccgccatgtattctaggaccacccttttgaggacga

SEQ ID NO: 41993 - DNA, 40 bp, Emericella nidulans
gttctcgagacgagcgatcgcgcgcgggccattgtctgtc

SEQ ID NO: 41994 - DNA, 46 bp, Emericella nidulans
gaattcactgcggccgccatggttcgccgcgatctataacgctacc

SEQ ID NO: 41995 - DNA, 41 bp, Emericella nidulans
gttctcgagacgagcgatcgctggcccagttgctcgccttc

SEQ ID NO: 41996 - DNA, 42 bp, Emericella nidulans
gaattcactgcggccgccatgttgagatagatagcgccaagc

SEQ ID NO: 41997 - DNA, 44 bp, Emericella nidulans
gttctcgagacgagcgatcgccaaagagtccttgttcatctcag

SEQ ID NO: 41998 - DNA, 49 bp, Emericella nidulans
gaattcactgcggccgccatgacctggtataggggagattacaccatcc

SEQ ID NO: 41999 - DNA, 49 bp, Emericella nidulans
gttctcgagacgagcgatcgctttaggcaattgggtgtttagtatcagg

SEQ ID NO: 42000 - DNA, 42 bp, Emericella nidulans
gaattcactgcggccgccatgtcgctgtgacgggatcactcc

SEQ ID NO: 42001 - DNA, 49 bp, Emericella nidulans
gttctcgagacgagcgatcgcgaagggtcaagttcaggtactccctcca

SEQ ID NO: 42002 - DNA, 41 bp, Emericella nidulans
gaattcactgcggccgccatgccccaatccggctccacgat

SEQ ID NO: 42003 - DNA, 44 bp, Emericella nidulans
gttctcgagacgagcgatcgcatccctccggatttcctcttgtg

SEQ ID NO: 42004 - DNA, 48 bp, Emericella nidulans
gaattcactgcggccgccatgtcttttaagcaagcaaagagcaggaga

SEQ ID NO: 42005 - DNA, 42 bp, Emericella nidulans
gttctcgagacgagcgatcgcgaggattcggaagcgggatga

SEQ ID NO: 42006 - DNA, 41 bp, Emericella nidulans
gaattcactgcggccgccatgggagtcgacgcctgcgttcc

SEQ ID NO: 42007 - DNA, 41 bp, Emericella nidulans
gttctcgagacgagcgatcgcgccggaaggggcagagacat

SEQ ID NO: 42008 - DNA, 47 bp, Emericella nidulans
gaattcactgcggccgccatgactttcaagccgacccttatccttca

SEQ ID NO: 42009 - DNA, 41 bp, Emericella nidulans
gttctcgagacgagcgatcgctccgcccagaatcctgctcc

SEQ ID NO: 42010 - DNA, 41 bp, Emericella nidulans
gaattcactgcggccgccatggaatgtgaatacgccaacga

SEQ ID NO: 42011 - DNA, 43 bp, Emericella nidulans
gttctcgagacgagcgatcgcattctcgagttcttccttgacc

SEQ ID NO: 42012 - DNA, 41 bp, Emericella nidulans
gaattcactgcggccgccatgaacggtcccgtctatcagaa

SEQ ID NO: 42013 - DNA, 41 bp, Emericella nidulans
gttctcgagacgagcgatcgctatggcgaaactcgtgaatg

SEQ ID NO: 42014 - DNA, 47 bp, Emericella nidulans
gaattcactgcggccgccatgtgatcgaagacgacatctaccgcact

SEQ ID NO: 42015 - DNA, 41 bp, Emericella nidulans
gttctcgagacgagcgatcgcggtgccggacgtcgaaggtg

SEQ ID NO: 42016 - DNA, 40 bp, Emericella nidulans
gaattcactgcggccgccatgcgtccgggtcgggcttctc

SEQ ID NO: 42017 - DNA, 41 bp, Emericella nidulans
gttctcgagacgagcgatcgcatgacggcgccgcttacgtc

SEQ ID NO: 42018 - DNA, 41 bp, Emericella nidulans
gaattcactgcggccgccatgcccaggggctacccggagat

SEQ ID NO: 42019 - DNA, 46 bp, Emericella nidulans
gttctcgagacgagcgatcgccatcgtcatgatttttgcaccgaac

SEQ ID NO: 42020 - DNA, 49 bp, Emericella nidulans
gaattcactgcggccgccatgaggtcatcctaatcactggaggtctgtc

SEQ ID NO: 42021 - DNA, 41 bp, Emericella nidulans
gttctcgagacgagcgatcgcgcggaaccccagcgaggtaa

SEQ ID NO: 42022 - DNA, 41 bp, Emericella nidulans
gaattcactgcggccgccatgtttctgggtgggtttcagag

SEQ ID NO: 42023 - DNA, 41 bp, Emericella nidulans
gttctcgagacgagcgatcgccctcagagctgacgacttcc

SEQ ID NO: 42024 - DNA, 41 bp, Emericella nidulans
gaattcactgcggccgccatgtttgggggccatatatttca

SEQ ID NO: 42025 - DNA, 41 bp, Emericella nidulans
gttctcgagacgagcgatcgcgaacggctccagtacgtgat

SEQ ID NO: 42026 - DNA, 41 bp, Emericella nidulans
gaattcactgcggccgccatgtgggtactcttgcagacgaa

SEQ ID NO: 42027 - DNA, 41 bp, Emericella nidulans
gttctcgagacgagcgatcgccaatcgctgacaccactcag

SEQ ID NO: 42028 - DNA, 41 bp, Emericella nidulans
gaattcactgcggccgccatgatccctctttcgttcgctct

SEQ ID NO: 42029 - DNA, 41 bp, Emericella nidulans
gttctcgagacgagcgatcgctgaggatctggttcactgga

SEQ ID NO: 42030 - DNA, 47 bp, Emericella nidulans
gaattcactgcggccgccatgttctctgcagtactcgccagattttc

SEQ ID NO: 42031 - DNA, 41 bp, Emericella nidulans
gttctcgagacgagcgatcgccccccatgcgacatagtgcc

SEQ ID NO: 42032 - DNA, 41 bp, Emericella nidulans
gaattcactgcggccgccatgtctacggcctaaaggacgac

SEQ ID NO: 42033 - DNA, 41 bp, Emericella nidulans
gttctcgagacgagcgatcgcaatgccggtcttgttctctg

SEQ ID NO: 42034 - DNA, 49 bp, Emericella nidulans
gaattcactgcggccgccatggtcgatatagatgtccgccatctcctcc

SEQ ID NO: 42035 - DNA, 41 bp, Emericella nidulans
gttctcgagacgagcgatcgcatagcgccggcgctctctcc

SEQ ID NO: 42036 - DNA, 47 bp, Emericella nidulans
gaattcactgcggccgccatgaatgcccagtgtctttggtccttaca

SEQ ID NO: 42037 - DNA, 41 bp, Emericella nidulans
gttctcgagacgagcgatcgcgcgggccggaggaagtgata

SEQ ID NO: 42038 - DNA, 44 bp, Emericella nidulans
gaattcactgcggccgccatgtttgtttggctcaaacctgctgt

SEQ ID NO: 42039 - DNA, 47 bp, Emericella nidulans
gttctcgagacgagcgatcgccccaggtaccgacaaagacccccgta

SEQ ID NO: 42040 - DNA, 41 bp, Emericella nidulans
gaattcactgcggccgccatggacgctaagggaagtggtca

SEQ ID NO: 42041 - DNA, 41 bp, Emericella nidulans
gttctcgagacgagcgatcgctggacaccgttataccacca

SEQ ID NO: 42042 - DNA, 42 bp, Emericella nidulans
gaattcactgcggccgccatgcagccacgagcagcaacagga

SEQ ID NO: 42043 - DNA, 46 bp, Emericella nidulans
gttctcgagacgagcgatcgcacactatgcgtaggtggttgctggt

SEQ ID NO: 42044 - DNA, 45 bp, Emericella nidulans
gaattcactgcggccgccatgcagtaacgacaacctcccgcttcc

SEQ ID NO: 42045 - DNA, 41 bp, Emericella nidulans
gttctcgagacgagcgatcgcatctcccgccccattcaccc

SEQ ID NO: 42046 - DNA, 45 bp, Emericella nidulans
gaattcactgcggccgccatgaacggaatgaagcttggtgtggag

SEQ ID NO: 42047 - DNA, 45 bp, Emericella nidulans
gttctcgagacgagcgatcgctcctcgttccagttttccacaagc

SEQ ID NO: 42048 - DNA, 41 bp, Emericella nidulans
gaattcactgcggccgccatgcggtcagctcgcaacgatcc

SEQ ID NO: 42049 - DNA, 44 bp, Emericella nidulans
gttctcgagacgagcgatcgccccgtcgaagacgaaccgtccta

SEQ ID NO: 42050 - DNA, 43 bp, Emericella nidulans
gaattcactgcggccgccatgccgggatttaaagcccaggagc

SEQ ID NO: 42051 - DNA, 45 bp, Emericella nidulans
gttctcgagacgagcgatcgcggttgcaccgtaggtgatgagctg

SEQ ID NO: 42052 - DNA, 45 bp, Emericella nidulans
gaattcactgcggccgccatgcattcagtgtaagtggatcttctg

SEQ ID NO: 42053 - DNA, 40 bp, Emericella nidulans
gttctcgagacgagcgatcgcagcttgattatggcgcctc

SEQ ID NO: 42054 - DNA, 41 bp, Emericella nidulans
gaattcactgcggccgccatgaccgcctcaggggcacgagt

SEQ ID NO: 42055 - DNA, 47 bp, Emericella nidulans
gttctcgagacgagcgatcgcttgcctgtaaaagacggaggtagctt

SEQ ID NO: 42056 - DNA, 45 bp, Emericella nidulans
gaattcactgcggccgccatgaaagagctttctcggccgtggctc

SEQ ID NO: 42057 - DNA, 44 bp, Emericella nidulans
gttctcgagacgagcgatcgccatccaattcgaccgcttcagca

SEQ ID NO: 42058 - DNA, 49 bp, Emericella nidulans
gaattcactgcggccgccatgtctcgatattatcgctaaaagcgaacac

SEQ ID NO: 42059 - DNA, 42 bp, Emericella nidulans
gttctcgagacgagcgatcgcgccgcaggcgatcatagctcc

SEQ ID NO: 42060 - DNA, 49 bp, Emericella nidulans
gaattcactgcggccgccatgaaaatcctgcccaagaaaggcgagcgta

SEQ ID NO: 42061 - DNA, 46 bp, Emericella nidulans
gttctcgagacgagcgatcgcgtctccccgagcatcatcgtaatgg

SEQ ID NO: 42062 - DNA, 42 bp, Emericella nidulans
gaattcactgcggccgccatggtgaaggcgggtatactatct

SEQ ID NO: 42063 - DNA, 41 bp, Emericella nidulans
gttctcgagacgagcgatcgcacttcgagtggatcctgagc

SEQ ID NO: 42064 - DNA, 45 bp, Emericella nidulans
gaattcactgcggccgccatgtcttcagggagggcagattcgaga

SEQ ID NO: 42065 - DNA, 43 bp, Emericella nidulans
gttctcgagacgagcgatcgccccatcatcagtgcctcgacca

SEQ ID NO: 42066 - DNA, 49 bp, Emericella nidulans
gaattcactgcggccgccatgaggcagatacagtaagatgagaaagaga

SEQ ID NO: 42067 - DNA, 47 bp, Emericella nidulans
gttctcgagacgagcgatcgcgagtgtttctttagttatgtttgcat

SEQ ID NO: 42068 - DNA, 41 bp, Emericella nidulans
gaattcactgcggccgccatgtgcaccgccttggggaactc

SEQ ID NO: 42069 - DNA, 42 bp, Emericella nidulans
gttctcgagacgagcgatcgcccttgaggttgttcccgccac

SEQ ID NO: 42070 - DNA, 42 bp, Emericella nidulans
gaattcactgcggccgccatgtcgatccccagcgcttcaagt

SEQ ID NO: 42071 - DNA, 49 bp, Emericella nidulans
gttctcgagacgagcgatcgcctctggatctctaacattttgccccgta

SEQ ID NO: 42072 - DNA, 48 bp, Emericella nidulans
gaattcactgcggccgccatgtgaaagtatccaggtccacgagaaacg

SEQ ID NO: 42073 - DNA, 41 bp, Emericella nidulans
gttctcgagacgagcgatcgcccacccaaatgcctcctcaa

SEQ ID NO: 42074 - DNA, 41 bp, Emericella nidulans
gaattcactgcggccgccatgttagatgcccccgcgtcacc

SEQ ID NO: 42075 - DNA, 41 bp, Emericella nidulans
gttctcgagacgagcgatcgcggcctcgacagcaggcgtta

SEQ ID NO: 42076 - DNA, 46 bp, Emericella nidulans
gaattcactgcggccgccatgaaatacagaagaaaacaaaccgaac

SEQ ID NO: 42077 - DNA, 49 bp, Emericella nidulans
gttctcgagacgagcgatcgctacatatttagactgaatgaaggttgtg

SEQ ID NO: 42078 - DNA, 40 bp, Emericella nidulans
gaattcactgcggccgccatgcctccagcgggggcgaaag

SEQ ID NO: 42079 - DNA, 49 bp, Emericella nidulans
gttctcgagacgagcgatcgctcagatcaggagttcaacgctgcggatt

SEQ ID NO: 42080 - DNA, 46 bp, Emericella nidulans
gaattcactgcggccgccatgctccagctatccagaaaaccccaca

SEQ ID NO: 42081 - DNA, 45 bp, Emericella nidulans
gttctcgagacgagcgatcgctcaccctcaccttgttcaggctcc

SEQ ID NO: 42082 - DNA, 49 bp, Emericella nidulans
gaattcactgcggccgccatgaggtcgtatcctgtccagtttagaaagc

SEQ ID NO: 42083 - DNA, 46 bp, Emericella nidulans
gttctcgagacgagcgatcgcctttagacattgcttgctctgtggg

SEQ ID NO: 42084 - DNA, 46 bp, Emericella nidulans
gaattcactgcggccgccatgcttgctacccagtggttggaagctc

SEQ ID NO: 42085 - DNA, 44 bp, Emericella nidulans
gttctcgagacgagcgatcgcgggccgtcccttatacatctcca

SEQ ID NO: 42086 - DNA, 49 bp, Emericella nidulans
gaattcactgcggccgccatggatacagacatggtgcgaatcttcatca

SEQ ID NO: 42087 - DNA, 48 bp, Emericella nidulans
gttctcgagacgagcgatcgcccagccaggatgcatgctaactacttg

SEQ ID NO: 42088 - DNA, 49 bp, Emericella nidulans
gaattcactgcggccgccatggaagggacaattccccgaattctggtct

SEQ ID NO: 42089 - DNA, 45 bp, Emericella nidulans
gttctcgagacgagcgatcgctcgggttgtaaccggtgccaatag

SEQ ID NO: 42090 - DNA, 48 bp, Emericella nidulans
gaattcactgcggccgccatgtcgccagagtatggaaagtatctctca

SEQ ID NO: 42091 - DNA, 41 bp, Emericella nidulans
gttctcgagacgagcgatcgcgtgggagccgtgcctccatt

SEQ ID NO: 42092 - DNA, 41 bp, Emericella nidulans
gaattcactgcggccgccatgagcctgaccataagcaccac

SEQ ID NO: 42093 - DNA, 41 bp, Emericella nidulans
gttctcgagacgagcgatcgccgttgaacttggtcgtgaaa

SEQ ID NO: 42094 - DNA, 48 bp, Emericella nidulans
gaattcactgcggccgccatgagattctattcccgccaacgattttga

SEQ ID NO: 42095 - DNA, 48 bp, Emericella nidulans
gttctcgagacgagcgatcgcgtttgagcgaacgactcactttttagc

SEQ ID NO: 42096 - DNA, 48 bp, Emericella nidulans
gaattcactgcggccgccatgaaaaagaagaaataactctgcagacaa

SEQ ID NO: 42097 - DNA, 39 bp, Emericella nidulans
gttctcgagacgagcgatcgcgctgcgcaaggtaccaat

SEQ ID NO: 42098 - DNA, 49 bp, Emericella nidulans
gaattcactgcggccgccatgatggatgaacggtctatgtggtatcttg

SEQ ID NO: 42099 - DNA, 42 bp, Emericella nidulans
gttctcgagacgagcgatcgccgccatcaaacgctctgttgc

SEQ ID NO: 42100 - DNA, 45 bp, Emericella nidulans
gaattcactgcggccgccatggaacactttaccgcaatcggctcc

SEQ ID NO: 42101 - DNA, 44 bp, Emericella nidulans
gttctcgagacgagcgatcgccacgatggatatagcccagagca

SEQ ID NO: 42102 - DNA, 49 bp, Emericella nidulans
gaattcactgcggccgccatgatgtttctagtcatgctggatgaaattg

SEQ ID NO: 42103 - DNA, 41 bp, Emericella nidulans
gttctcgagacgagcgatcgccgacaaggcctaaagtctcc

SEQ ID NO: 42104 - DNA, 48 bp, Emericella nidulans
gaattcactgcggccgccatgtgacactctccgtcagacaacaatccc

SEQ ID NO: 42105 - DNA, 48 bp, Emericella nidulans
gttctcgagacgagcgatcgcaggtcgaagattcggagtttcttctcg

SEQ ID NO: 42106 - DNA, 45 bp, Emericella nidulans
gaattcactgcggccgccatgaagttttcaaccttctctggagtc

SEQ ID NO: 42107 - DNA, 41 bp, Emericella nidulans
gttctcgagacgagcgatcgctcagccccaaagttttgttt

SEQ ID NO: 42108 - DNA, 39 bp, Emericella nidulans
gaattcactgcggccgccatgcagtgcgcgctcaatatg

SEQ ID NO: 42109 - DNA, 41 bp, Emericella nidulans
gttctcgagacgagcgatcgccgtacgaaaacctcagctcc

SEQ ID NO: 42110 - DNA, 40 bp, Emericella nidulans
gaattcactgcggccgccatggctgcgattctggatctcg

SEQ ID NO: 42111 - DNA, 46 bp, Emericella nidulans
gttctcgagacgagcgatcgcagacctattaagaaacaggcaacaa

SEQ ID NO: 42112 - DNA, 41 bp, Emericella nidulans
gaattcactgcggccgccatggcgcctgcgcctgaaatgaa

SEQ ID NO: 42113 - DNA, 44 bp, Emericella nidulans
gttctcgagacgagcgatcgctcggttgatctggaaccttagca

SEQ ID NO: 42114 - DNA, 41 bp, Emericella nidulans
gaattcactgcggccgccatgcttcctccgtcaccagaaac

SEQ ID NO: 42115 - DNA, 41 bp, Emericella nidulans
gttctcgagacgagcgatcgcaacctcatccttctgcgtaa

SEQ ID NO: 42116 - DNA, 41 bp, Emericella nidulans
gaattcactgcggccgccatgcgtcagccaccaccccatcc

SEQ ID NO: 42117 - DNA, 49 bp, Emericella nidulans
gttctcgagacgagcgatcgctatgcgagagacattaaagaagcccatc

SEQ ID NO: 42118 - DNA, 41 bp, Emericella nidulans
gaattcactgcggccgccatgacatcatgaacccaagcacc

SEQ ID NO: 42119 - DNA, 41 bp, Emericella nidulans
gttctcgagacgagcgatcgcatggttcgacattgctcgtc

SEQ ID NO: 42120 - DNA, 48 bp, Emericella nidulans
gaattcactgcggccgccatgtacatgatcggcctggctatgcgtaca

SEQ ID NO: 42121 - DNA, 41 bp, Emericella nidulans
gttctcgagacgagcgatcgccatggcggcgttgacgagaa

SEQ ID NO: 42122 - DNA, 45 bp, Emericella nidulans
gaattcactgcggccgccatggccggttacagtctcacctggcac

SEQ ID NO: 42123 - DNA, 44 bp, Emericella nidulans
gttctcgagacgagcgatcgccctcagtcacatcccgaccaaca

SEQ ID NO: 42124 - DNA, 42 bp, Emericella nidulans
gaattcactgcggccgccatgttcgagatgtacacacgcagt

SEQ ID NO: 42125 - DNA, 43 bp, Emericella nidulans
gttctcgagacgagcgatcgctgcaacattgttgtttctagcc

SEQ ID NO: 42126 - DNA, 44 bp, Emericella nidulans
gaattcactgcggccgccatgtgtcttgcttctgcttggcctca

SEQ ID NO: 42127 - DNA, 46 bp, Emericella nidulans
gttctcgagacgagcgatcgcatgctctcgcattccaaaactgacc

SEQ ID NO: 42128 - DNA, 41 bp, Emericella nidulans
gaattcactgcggccgccatgtcccggcgcacgcacataat

SEQ ID NO: 42129 - DNA, 49 bp, Emericella nidulans
gttctcgagacgagcgatcgcgaactcccctatatattgcatccgcaac

SEQ ID NO: 42130 - DNA, 43 bp, Emericella nidulans
gaattcactgcggccgccatggcctcgcgtgacaatgtcctca

SEQ ID NO: 42131 - DNA, 41 bp, Emericella nidulans
gttctcgagacgagcgatcgcccgcattgcgcgttgtgaaa

SEQ ID NO: 42132 - DNA, 49 bp, Emericella nidulans
gaattcactgcggccgccatgtcaatgacacgagaacgaaactgataca

SEQ ID NO: 42133 - DNA, 41 bp, Emericella nidulans
gttctcgagacgagcgatcgctctccgcggccgccataata

SEQ ID NO: 42134 - DNA, 42 bp, Emericella nidulans
gaattcactgcggccgccatgaagtacggcgcggagagggtg

SEQ ID NO: 42135 - DNA, 42 bp, Emericella nidulans
gttctcgagacgagcgatcgctagcagcgtggcggctataca

SEQ ID NO: 42136 - DNA, 49 bp, Emericella nidulans
gaattcactgcggccgccatgtggctacaaaagcagcttacaaaagggt

SEQ ID NO: 42137 - DNA, 43 bp, Emericella nidulans
gttctcgagacgagcgatcgccgggtcttaattgcccggttgc

SEQ ID NO: 42138 - DNA, 41 bp, Emericella nidulans
gaattcactgcggccgccatgacagcactccagtccacctc

SEQ ID NO: 42139 - DNA, 41 bp, Emericella nidulans
gttctcgagacgagcgatcgcgtgctcgtatgtgacgatcc

SEQ ID NO: 42140 - DNA, 45 bp, Emericella nidulans
gaattcactgcggccgccatggctattggcatccagctcccttga

SEQ ID NO: 42141 - DNA, 41 bp, Emericella nidulans
gttctcgagacgagcgatcgcctgctgcagctcgcccgtta

SEQ ID NO: 42142 - DNA, 49 bp, Emericella nidulans
gaattcactgcggccgccatggtatattatgaactaggaatacccagga

SEQ ID NO: 42143 - DNA, 41 bp, Emericella nidulans
gttctcgagacgagcgatcgctgccctgtacagagctgttg

SEQ ID NO: 42144 - DNA, 41 bp, Emericella nidulans
gaattcactgcggccgccatgtctgggcggttggcttgtcc

SEQ ID NO: 42145 - DNA, 49 bp, Emericella nidulans
gttctcgagacgagcgatcgcggctctagcgtaaaggacctcggcgaac

SEQ ID NO: 42146 - DNA, 41 bp, Emericella nidulans
gaattcactgcggccgccatgcctcagggccaagtaacaga

SEQ ID NO: 42147 - DNA, 41 bp, Emericella nidulans
gttctcgagacgagcgatcgctaatctgcagtcctggggtg

SEQ ID NO: 42148 - DNA, 49 bp, Emericella nidulans
gaattcactgcggccgccatgtctctagtatgctccctctgctcctcgt

SEQ ID NO: 42149 - DNA, 44 bp, Emericella nidulans
gttctcgagacgagcgatcgcggtcctctcgtggcacacgatct

SEQ ID NO: 42150 - DNA, 44 bp, Emericella nidulans
gaattcactgcggccgccatggcaagcatcacttggcttgatcg

SEQ ID NO: 42151 - DNA, 41 bp, Emericella nidulans
gttctcgagacgagcgatcgccgggacacgacgcctgaaca

SEQ ID NO: 42152 - DNA, 42 bp, Emericella nidulans
gaattcactgcggccgccatgcgtggtgattatggtacttcg

SEQ ID NO: 42153 - DNA, 41 bp, Emericella nidulans
gttctcgagacgagcgatcgcccatttgttgcggtagaggt

SEQ ID NO: 42154 - DNA, 41 bp, Emericella nidulans
gaattcactgcggccgccatgatgcaccgtcgagacctagt

SEQ ID NO: 42155 - DNA, 40 bp, Emericella nidulans
gttctcgagacgagcgatcgcagcaaaagggtgcaccaag

SEQ ID NO: 42156 - DNA, 41 bp, Emericella nidulans
gaattcactgcggccgccatggctcccgttcgccgtatgga

SEQ ID NO: 42157 - DNA, 45 bp, Emericella nidulans
gttctcgagacgagcgatcgctgctgtagggcagccaacagagat

SEQ ID NO: 42158 - DNA, 46 bp, Emericella nidulans
gaattcactgcggccgccatgacctacaggccaaaatcccacagga

SEQ ID NO: 42159 - DNA, 45 bp, Emericella nidulans
gttctcgagacgagcgatcgccgcatcagaaacaatctgggcctc

SEQ ID NO: 42160 - DNA, 46 bp, Emericella nidulans
gaattcactgcggccgccatgcgcaataacacccatacaggtcacg

SEQ ID NO: 42161 - DNA, 46 bp, Emericella nidulans
gttctcgagacgagcgatcgcactggtgagcccttcaacggcttgg

SEQ ID NO: 42162 - DNA, 40 bp, Emericella nidulans
gaattcactgcggccgccatgcagtccactgctggtcagg

SEQ ID NO: 42163 - DNA, 41 bp, Emericella nidulans
gttctcgagacgagcgatcgcgcccagaaaaaccataaacg

SEQ ID NO: 42164 - DNA, 47 bp, Emericella nidulans
gaattcactgcggccgccatgaaagatacgtttgaacggggaatgga

SEQ ID NO: 42165 - DNA, 41 bp, Emericella nidulans
gttctcgagacgagcgatcgcttgagcgtccacggggtgtg

SEQ ID NO: 42166 - DNA, 48 bp, Emericella nidulans
gaattcactgcggccgccatgcgccacttcatgaagaatggtgttttg

SEQ ID NO: 42167 - DNA, 44 bp, Emericella nidulans
gttctcgagacgagcgatcgcgccaagggtgtttgaggcactcc

SEQ ID NO: 42168 - DNA, 40 bp, Emericella nidulans
gaattcactgcggccgccatgaactccctgctgcgttctt

SEQ ID NO: 42169 - DNA, 40 bp, Emericella nidulans
gttctcgagacgagcgatcgcgtcgacccatggaggcaat

SEQ ID NO: 42170 - DNA, 42 bp, Emericella nidulans
gaattcactgcggccgccatgcagaagatggcgtcgatgctg

SEQ ID NO: 42171 - DNA, 48 bp, Emericella nidulans
gttctcgagacgagcgatcgccctattgctggactatctcttccctgt

SEQ ID NO: 42172 - DNA, 45 bp, Emericella nidulans
gaattcactgcggccgccatgcagcaagaccgaatcgagatggtg

SEQ ID NO: 42173 - DNA, 41 bp, Emericella nidulans
gttctcgagacgagcgatcgcatggcggcgcaattccacaa

SEQ ID NO: 42174 - DNA, 41 bp, Emericella nidulans
gaattcactgcggccgccatgggccggcctgtgtctcggta

SEQ ID NO: 42175 - DNA, 41 bp, Emericella nidulans
gttctcgagacgagcgatcgccggctgagagcccgcacttg

SEQ ID NO: 42176 - DNA, 41 bp, Emericella nidulans
gaattcactgcggccgccatggggcgaatctcgtcgccgta

SEQ ID NO: 42177 - DNA, 44 bp, Emericella nidulans
gttctcgagacgagcgatcgcttgtccgcagcagattcaagaag

SEQ ID NO: 42178 - DNA, 41 bp, Emericella nidulans
gaattcactgcggccgccatgcccggatggcactcagaccc

SEQ ID NO: 42179 - DNA, 44 bp, Emericella nidulans
gttctcgagacgagcgatcgcggtcattcgccctcgtacaggct

SEQ ID NO: 42180 - DNA, 41 bp, Emericella nidulans
gaattcactgcggccgccatgcaattcgccatcctcatctt

SEQ ID NO: 42181 - DNA, 44 bp, Emericella nidulans
gttctcgagacgagcgatcgcgaggtaggtgatgtactccaggt

SEQ ID NO: 42182 - DNA, 47 bp, Emericella nidulans
gaattcactgcggccgccatgaggctgtcagcaacagaaccgtcttc

SEQ ID NO: 42183 - DNA, 41 bp, Emericella nidulans
gttctcgagacgagcgatcgccgcttcccgggcgttgagta

SEQ ID NO: 42184 - DNA, 41 bp, Emericella nidulans
gaattcactgcggccgccatgggagacctgcgcttcgcacc

SEQ ID NO: 42185 - DNA, 48 bp, Emericella nidulans
gttctcgagacgagcgatcgcagcgtaagcataagcatcaaccgaagc

SEQ ID NO: 42186 - DNA, 41 bp, Emericella nidulans
gaattcactgcggccgccatgacgcagtcgcagcctcgtca

SEQ ID NO: 42187 - DNA, 41 bp, Emericella nidulans
gttctcgagacgagcgatcgcacgctggcccacacgctttc

SEQ ID NO: 42188 - DNA, 42 bp, Emericella nidulans
gaattcactgcggccgccatgcatttcagggctccggtttca

SEQ ID NO: 42189 - DNA, 42 bp, Emericella nidulans
gttctcgagacgagcgatcgccgaacggggagggatttgtcg

SEQ ID NO: 42190 - DNA, 43 bp, Emericella nidulans
gaattcactgcggccgccatgcatgtgtacgggatctaatgct

SEQ ID NO: 42191 - DNA, 41 bp, Emericella nidulans
gttctcgagacgagcgatcgcgcgaacgaagcaaatatcgt

SEQ ID NO: 42192 - DNA, 42 bp, Emericella nidulans
gaattcactgcggccgccatgtggctggtttgccgctagaga

SEQ ID NO: 42193 - DNA, 44 bp, Emericella nidulans
gttctcgagacgagcgatcgcggctgccaatagtggaggcctga

SEQ ID NO: 42194 - DNA, 43 bp, Emericella nidulans
gaattcactgcggccgccatgccttcctcacctggtcgcacct

SEQ ID NO: 42195 - DNA, 44 bp, Emericella nidulans
gttctcgagacgagcgatcgcgcacgctcctcatagacctgctg

SEQ ID NO: 42196 - DNA, 41 bp, Emericella nidulans
gaattcactgcggccgccatgcagccagctggtgggccttc

SEQ ID NO: 42197 - DNA, 49 bp, Emericella nidulans
gttctcgagacgagcgatcgctaggcttcttctccgatttctctagctc

SEQ ID NO: 42198 - DNA, 47 bp, Emericella nidulans
gaattcactgcggccgccatgacctccgaacactgtctccaaggatg

SEQ ID NO: 42199 - DNA, 41 bp, Emericella nidulans
gttctcgagacgagcgatcgcccgcccgggtggaagctttt

SEQ ID NO: 42200 - DNA, 41 bp, Emericella nidulans
gaattcactgcggccgccatggcccgcaactatctgctcta

SEQ ID NO: 42201 - DNA, 41 bp, Emericella nidulans
gttctcgagacgagcgatcgcgacctggtatccagcacgtt

SEQ ID NO: 42202 - DNA, 42 bp, Emericella nidulans
gaattcactgcggccgccatggaagcaccaggatactcatcg

SEQ ID NO: 42203 - DNA, 41 bp, Emericella nidulans
gttctcgagacgagcgatcgccttcctccagcaagaagcac

SEQ ID NO: 42204 - DNA, 46 bp, Emericella nidulans
gaattcactgcggccgccatgcaattccaaataatttgcacagggt

SEQ ID NO: 42205 - DNA, 44 bp, Emericella nidulans
gttctcgagacgagcgatcgcagtcagaccagataaaagggaga

SEQ ID NO: 42206 - DNA, 49 bp, Emericella nidulans
gaattcactgcggccgccatgcagagcctgatcaaccctttgattttca

SEQ ID NO: 42207 - DNA, 46 bp, Emericella nidulans
gttctcgagacgagcgatcgcctgctgaagtgtccgatttctttgc

SEQ ID NO: 42208 - DNA, 44 bp, Emericella nidulans
gaattcactgcggccgccatgtgcgaattactccgtccccgtct

SEQ ID NO: 42209 - DNA, 43 bp, Emericella nidulans
gttctcgagacgagcgatcgcccggaggattctgtctctgtcg

SEQ ID NO: 42210 - DNA, 44 bp, Emericella nidulans
gaattcactgcggccgccatgcgctaggttcctgcgttaacagg

SEQ ID NO: 42211 - DNA, 47 bp, Emericella nidulans
gttctcgagacgagcgatcgctgctgattgagactgaagagtcatgc

SEQ ID NO: 42212 - DNA, 49 bp, Emericella nidulans
gaattcactgcggccgccatggatgatatgtagtattcggcttcgcaac

SEQ ID NO: 42213 - DNA, 45 bp, Emericella nidulans
gttctcgagacgagcgatcgcctgaaggagcctctcttttgtggg

SEQ ID NO: 42214 - DNA, 49 bp, Emericella nidulans
gaattcactgcggccgccatgtgtggtctatagctactttttccaccca

SEQ ID NO: 42215 - DNA, 41 bp, Emericella nidulans
gttctcgagacgagcgatcgcagccgaaaagccagcctgat

SEQ ID NO: 42216 - DNA, 41 bp, Emericella nidulans
gaattcactgcggccgccatggcccgatttctcatagtgct

SEQ ID NO: 42217 - DNA, 41 bp, Emericella nidulans
gttctcgagacgagcgatcgctaggggtcgggtaataaaca

SEQ ID NO: 42218 - DNA, 49 bp, Emericella nidulans
gaattcactgcggccgccatgtcttattgagaaatacagccgtggcttc

SEQ ID NO: 42219 - DNA, 46 bp, Emericella nidulans
gttctcgagacgagcgatcgcgaggatagcgtcgcctcaataatgc

SEQ ID NO: 42220 - DNA, 41 bp, Emericella nidulans
gaattcactgcggccgccatgcaacgggacttcgaaaacag

SEQ ID NO: 42221 - DNA, 40 bp, Emericella nidulans
gttctcgagacgagcgatcgcataggcccatgacgaaacc

SEQ ID NO: 42222 - DNA, 48 bp, Emericella nidulans
gaattcactgcggccgccatggcaagaccgacggtactatcaaaggct

SEQ ID NO: 42223 - DNA, 46 bp, Emericella nidulans
gttctcgagacgagcgatcgctataaggagacgttcatgcggtggg

SEQ ID NO: 42224 - DNA, 41 bp, Emericella nidulans
gaattcactgcggccgccatgccgcagccccaggattcgta

SEQ ID NO: 42225 - DNA, 45 bp, Emericella nidulans
gttctcgagacgagcgatcgcaagctcgtcaatatctcgcccata

SEQ ID NO: 42226 - DNA, 41 bp, Emericella nidulans
gaattcactgcggccgccatgtcagccccactggcggaata

SEQ ID NO: 42227 - DNA, 43 bp, Emericella nidulans
gttctcgagacgagcgatcgcaggaggcgagtgcgacttgtga

SEQ ID NO: 42228 - DNA, 42 bp, Emericella nidulans
gaattcactgcggccgccatgccctcatcgaatccgtggtgc

SEQ ID NO: 42229 - DNA, 45 bp, Emericella nidulans
gttctcgagacgagcgatcgcgcaggactgatgcttaccacgatg

SEQ ID NO: 42230 - DNA, 49 bp, Emericella nidulans
gaattcactgcggccgccatgagtctacctcgtaatggacttcctcgaa

SEQ ID NO: 42231 - DNA, 48 bp, Emericella nidulans
gttctcgagacgagcgatcgcacttcctgcagaaacagccactcttga

SEQ ID NO: 42232 - DNA, 48 bp, Emericella nidulans
gaattcactgcggccgccatgagaatagtgagggtaaaattgatgaga

SEQ ID NO: 42233 - DNA, 42 bp, Emericella nidulans
gttctcgagacgagcgatcgcttccaaatcgttcatacatgg

SEQ ID NO: 42234 - DNA, 41 bp, Emericella nidulans
gaattcactgcggccgccatgctatcataggcgcactgcaa

SEQ ID NO: 42235 - DNA, 41 bp, Emericella nidulans
gttctcgagacgagcgatcgcacaggctgtgtcgagggtta

SEQ ID NO: 42236 - DNA, 41 bp, Emericella nidulans
gaattcactgcggccgccatggcacagaacgtgggatacag

SEQ ID NO: 42237 - DNA, 41 bp, Emericella nidulans
gttctcgagacgagcgatcgcaagcgaaccgaacatacacc

SEQ ID NO: 42238 - DNA, 45 bp, Emericella nidulans
gaattcactgcggccgccatgtataaaaccatccaatgtccttgt

SEQ ID NO: 42239 - DNA, 41 bp, Emericella nidulans
gttctcgagacgagcgatcgctcggtcgttcctcagatttt

SEQ ID NO: 42240 - DNA, 48 bp, Emericella nidulans
gaattcactgcggccgccatgtgacctggtcgattggtctaagtacgc

SEQ ID NO: 42241 - DNA, 41 bp, Emericella nidulans
gttctcgagacgagcgatcgcggggcattgcgacaggtgtg

SEQ ID NO: 42242 - DNA, 47 bp, Emericella nidulans
gaattcactgcggccgccatgatcgctttaacatttgccatcgggac

SEQ ID NO: 42243 - DNA, 41 bp, Emericella nidulans
gttctcgagacgagcgatcgcactgacggggctcgagaacg

SEQ ID NO: 42244 - DNA, 49 bp, Emericella nidulans
gaattcactgcggccgccatgttgagtctcttgaacacaaactccatga

SEQ ID NO: 42245 - DNA, 48 bp, Emericella nidulans
gttctcgagacgagcgatcgcaaaagatgttgggtttgcttccgataa

SEQ ID NO: 42246 - DNA, 47 bp, Emericella nidulans
gaattcactgcggccgccatgttaaagctcgtagccctcctcttgtt

SEQ ID NO: 42247 - DNA, 41 bp, Emericella nidulans
gttctcgagacgagcgatcgccggcgcgccataatcctgag

SEQ ID NO: 42248 - DNA, 43 bp, Emericella nidulans
gaattcactgcggccgccatgtcaacatctggacaatttcagt

SEQ ID NO: 42249 - DNA, 41 bp, Emericella nidulans
gttctcgagacgagcgatcgccactcggttgtgtcgaggta

SEQ ID NO: 42250 - DNA, 41 bp, Emericella nidulans
gaattcactgcggccgccatgcaacgccagctccccgtgtc

SEQ ID NO: 42251 - DNA, 41 bp, Emericella nidulans
gttctcgagacgagcgatcgcgcggcttcgcaggagtggaa

SEQ ID NO: 42252 - DNA, 44 bp, Emericella nidulans
gaattcactgcggccgccatggttaggactttggtaggttgctc

SEQ ID NO: 42253 - DNA, 41 bp, Emericella nidulans
gttctcgagacgagcgatcgccgtgctgaaattccaatcct

SEQ ID NO: 42254 - DNA, 45 bp, Emericella nidulans
gaattcactgcggccgccatgtggacgacccagtctctatcatgc

SEQ ID NO: 42255 - DNA, 49 bp, Emericella nidulans
gttctcgagacgagcgatcgctacctccatagacaaaacctggtcagca

SEQ ID NO: 42256 - DNA, 47 bp, Emericella nidulans
gaattcactgcggccgccatgaagatgaacatcctccactcgacatt

SEQ ID NO: 42257 - DNA, 41 bp, Emericella nidulans
gttctcgagacgagcgatcgcacgggtgcacgcttgccatt

SEQ ID NO: 42258 - DNA, 41 bp, Emericella nidulans
gaattcactgcggccgccatgcccgcccaagcatcaagaca

SEQ ID NO: 42259 - DNA, 43 bp, Emericella nidulans
gttctcgagacgagcgatcgcgcttcgatgctttgaccgtgcc

SEQ ID NO: 42260 - DNA, 41 bp, Emericella nidulans
gaattcactgcggccgccatgtgggaacgggagcaggagga

SEQ ID NO: 42261 - DNA, 42 bp, Emericella nidulans
gttctcgagacgagcgatcgctccaccgggaccctgagatcc

SEQ ID NO: 42262 - DNA, 41 bp, Emericella nidulans
gaattcactgcggccgccatgttttggtgtctatccgctcc

SEQ ID NO: 42263 - DNA, 41 bp, Emericella nidulans
gttctcgagacgagcgatcgcgatggaatcgatcgcaagtt

SEQ ID NO: 42264 - DNA, 41 bp, Emericella nidulans
gaattcactgcggccgccatgcaatgacgtgcctcaatgtc

SEQ ID NO: 42265 - DNA, 42 bp, Emericella nidulans
gttctcgagacgagcgatcgcggaaactgttttcgtctgctg

SEQ ID NO: 42266 - DNA, 48 bp, Emericella nidulans
gaattcactgcggccgccatgatgtctattccaaacatgcagtcatcg

SEQ ID NO: 42267 - DNA, 49 bp, Emericella nidulans
gttctcgagacgagcgatcgcctcctgaatacttgtctctcgcccaagg

SEQ ID NO: 42268 - DNA, 47 bp, Emericella nidulans
gaattcactgcggccgccatgcaggtttatgaatacttcatctctca

SEQ ID NO: 42269 - DNA, 40 bp, Emericella nidulans
gttctcgagacgagcgatcgcggatcgaattgctcgtcct

SEQ ID NO: 42270 - DNA, 45 bp, Emericella nidulans
gaattcactgcggccgccatgcaaggtgcaaacctgaacacacaa

SEQ ID NO: 42271 - DNA, 42 bp, Emericella nidulans
gttctcgagacgagcgatcgccggctgatgcggtctggtctc

SEQ ID NO: 42272 - DNA, 40 bp, Emericella nidulans
gaattcactgcggccgccatggcgcgccagagcaaacagc

SEQ ID NO: 42273 - DNA, 49 bp, Emericella nidulans
gttctcgagacgagcgatcgctgtactaggtagaccagttgcgccagca

SEQ ID NO: 42274 - DNA, 43 bp, Emericella nidulans
gaattcactgcggccgccatgtcaagcatggagcgtttttgga

SEQ ID NO: 42275 - DNA, 44 bp, Emericella nidulans
gttctcgagacgagcgatcgcctggctatggctcaaagcgaccc

SEQ ID NO: 42276 - DNA, 49 bp, Emericella nidulans
gaattcactgcggccgccatggtatgctgccatcagcaagcttcctccc

SEQ ID NO: 42277 - DNA, 47 bp, Emericella nidulans
gttctcgagacgagcgatcgctgtcgtctccacgatctctctggcta

SEQ ID NO: 42278 - DNA, 41 bp, Emericella nidulans
gaattcactgcggccgccatgtacgtccgcttccaaagact

SEQ ID NO: 42279 - DNA, 46 bp, Emericella nidulans
gttctcgagacgagcgatcgcttgtagattagtgtgctggtgtaga

SEQ ID NO: 42280 - DNA, 41 bp, Emericella nidulans
gaattcactgcggccgccatggcccgagcggcaaggtctct

SEQ ID NO: 42281 - DNA, 42 bp, Emericella nidulans
gttctcgagacgagcgatcgcccgacagcatactggccaagg

SEQ ID NO: 42282 - DNA, 41 bp, Emericella nidulans
gaattcactgcggccgccatgcatccggtacgggcggtgac

SEQ ID NO: 42283 - DNA, 48 bp, Emericella nidulans
gttctcgagacgagcgatcgctgtggagcaaatatgtgaggaggaagc

SEQ ID NO: 42284 - DNA, 40 bp, Emericella nidulans
gaattcactgcggccgccatgctcaccgaccgatgacaac

SEQ ID NO: 42285 - DNA, 42 bp, Emericella nidulans
gttctcgagacgagcgatcgccctgggtgagattcttcatca

SEQ ID NO: 42286 - DNA, 41 bp, Emericella nidulans
gaattcactgcggccgccatgaggattgaccaatcagaggc

SEQ ID NO: 42287 - DNA, 46 bp, Emericella nidulans
gttctcgagacgagcgatcgcttcgatccaacataggtatttatag

SEQ ID NO: 42288 - DNA, 49 bp, Emericella nidulans
gaattcactgcggccgccatgggtctgaatattaccgaagcttggaacg

SEQ ID NO: 42289 - DNA, 41 bp, Emericella nidulans
gttctcgagacgagcgatcgctccctttcggggcgcatttt

SEQ ID NO: 42290 - DNA, 45 bp, Emericella nidulans
gaattcactgcggccgccatgcttctagaggtccacgggcctagc

SEQ ID NO: 42291 - DNA, 41 bp, Emericella nidulans
gttctcgagacgagcgatcgccggcttcatgcggcgttgtt

SEQ ID NO: 42292 - DNA, 41 bp, Emericella nidulans
gaattcactgcggccgccatgggtattgtcgcctctggtgt

SEQ ID NO: 42293 - DNA, 43 bp, Emericella nidulans
gttctcgagacgagcgatcgctgtcaagactagtgtgaagtcg

SEQ ID NO: 42294 - DNA, 40 bp, Emericella nidulans
gaattcactgcggccgccatggccagctccgtgcgggaga

SEQ ID NO: 42295 - DNA, 45 bp, Emericella nidulans
gttctcgagacgagcgatcgctagtgcattcaaatcggctcctct

SEQ ID NO: 42296 - DNA, 41 bp, Emericella nidulans
gaattcactgcggccgccatggccagttgttgacacccata

SEQ ID NO: 42297 - DNA, 47 bp, Emericella nidulans
gttctcgagacgagcgatcgcgcaagtcaatggtagttgattgccta

SEQ ID NO: 42298 - DNA, 47 bp, Emericella nidulans
gaattcactgcggccgccatgcaactggaaagatattcgatgcgaca

SEQ ID NO: 42299 - DNA, 49 bp, Emericella nidulans
gttctcgagacgagcgatcgccctttctgttgaattatccaatgcttcg

SEQ ID NO: 42300 - DNA, 46 bp, Emericella nidulans
gaattcactgcggccgccatgtttctaaatgctgtccgtcgagatg

SEQ ID NO: 42301 - DNA, 49 bp, Emericella nidulans
gttctcgagacgagcgatcgcattacatttgggcagttatctggagtgg

SEQ ID NO: 42302 - DNA, 41 bp, Emericella nidulans
gaattcactgcggccgccatgcgccagtcgttgcccatcct

SEQ ID NO: 42303 - DNA, 48 bp, Emericella nidulans
gttctcgagacgagcgatcgcctcagaaagaagcagctcaggaacacc

SEQ ID NO: 42304 - DNA, 43 bp, Emericella nidulans
gaattcactgcggccgccatgcggcgccgtctctgataaacga

SEQ ID NO: 42305 - DNA, 41 bp, Emericella nidulans
gttctcgagacgagcgatcgcgccgaatggcccgaacgtag

SEQ ID NO: 42306 - DNA, 41 bp, Emericella nidulans
gaattcactgcggccgccatgggcagcaaaagcattcttga

SEQ ID NO: 42307 - DNA, 45 bp, Emericella nidulans
gttctcgagacgagcgatcgcatatccatatcatctgcattgtcg

SEQ ID NO: 42308 - DNA, 43 bp, Emericella nidulans
gaattcactgcggccgccatgggtgcatgatccgcagaagctc

SEQ ID NO: 42309 - DNA, 49 bp, Emericella nidulans
gttctcgagacgagcgatcgcgacaagatagcatttcttctccgcctta

SEQ ID NO: 42310 - DNA, 41 bp, Emericella nidulans
gaattcactgcggccgccatggccatttctcgaagcatctc

SEQ ID NO: 42311 - DNA, 41 bp, Emericella nidulans
gttctcgagacgagcgatcgccaagtaaagggtccgtcgaa

SEQ ID NO: 42312 - DNA, 48 bp, Emericella nidulans
gaattcactgcggccgccatggtcctatgcagtgttatgaaatggtgc

SEQ ID NO: 42313 - DNA, 47 bp, Emericella nidulans
gttctcgagacgagcgatcgcctgcgaattcttgcaaatgcttatca

SEQ ID NO: 42314 - DNA, 49 bp, Emericella nidulans
gaattcactgcggccgccatgtatcaagcttgactcctttactggtcgt

SEQ ID NO: 42315 - DNA, 44 bp, Emericella nidulans
gttctcgagacgagcgatcgccccatgaaattccgttcccatga

SEQ ID NO: 42316 - DNA, 47 bp, Emericella nidulans
gaattcactgcggccgccatgtcgactctcttgtccttccaggcaac

SEQ ID NO: 42317 - DNA, 48 bp, Emericella nidulans
gttctcgagacgagcgatcgcttgtcagaaagaggattccctgaaaat

SEQ ID NO: 42318 - DNA, 41 bp, Emericella nidulans
gaattcactgcggccgccatgtttgcccctctggcccgttc

SEQ ID NO: 42319 - DNA, 48 bp, Emericella nidulans
gttctcgagacgagcgatcgccgtagcctccatagcaataagggcaca

SEQ ID NO: 42320 - DNA, 41 bp, Emericella nidulans
gaattcactgcggccgccatgcgtgatctcggctgccgttg

SEQ ID NO: 42321 - DNA, 47 bp, Emericella nidulans
gttctcgagacgagcgatcgcctatactccaccaccatctccgcagt

SEQ ID NO: 42322 - DNA, 41 bp, Emericella nidulans
gaattcactgcggccgccatgcccgagtcttctaccgaagt

SEQ ID NO: 42323 - DNA, 41 bp, Emericella nidulans
gttctcgagacgagcgatcgccatgctcatttccgtaacca

SEQ ID NO: 42324 - DNA, 47 bp, Emericella nidulans
gaattcactgcggccgccatggaaaatgactgaatttcaaatcccac

SEQ ID NO: 42325 - DNA, 41 bp, Emericella nidulans
gttctcgagacgagcgatcgcaatctgagacgtccgtttgg

SEQ ID NO: 42326 - DNA, 49 bp, Emericella nidulans
gaattcactgcggccgccatggataaacgatcagattgcatatggggtg

SEQ ID NO: 42327 - DNA, 40 bp, Emericella nidulans
gttctcgagacgagcgatcgcagcctccaaggcgcgatgc

SEQ ID NO: 42328 - DNA, 49 bp, Emericella nidulans
gaattcactgcggccgccatgcttcgcattgtatgtcttggcaatctcc

SEQ ID NO: 42329 - DNA, 41 bp, Emericella nidulans
gttctcgagacgagcgatcgctgctttcccgcgcaatctcc

SEQ ID NO: 42330 - DNA, 41 bp, Emericella nidulans
gaattcactgcggccgccatggcgattgcagagttgacaga

SEQ ID NO: 42331 - DNA, 41 bp, Emericella nidulans
gttctcgagacgagcgatcgctagagattgccgagaagacc

SEQ ID NO: 42332 - DNA, 49 bp, Emericella nidulans
gaattcactgcggccgccatggaggaataccagctactagggttgggtg

SEQ ID NO: 42333 - DNA, 46 bp, Emericella nidulans
gttctcgagacgagcgatcgcaactatgcccataatgccatcaaca

SEQ ID NO: 42334 - DNA, 46 bp, Emericella nidulans
gaattcactgcggccgccatgttcgacatcctcagaattgctctca

SEQ ID NO: 42335 - DNA, 41 bp, Emericella nidulans
gttctcgagacgagcgatcgcatgtcggcccctgcgtcgta

SEQ ID NO: 42336 - DNA, 48 bp, Emericella nidulans
gaattcactgcggccgccatgagatgccacagttcctttacttccatc

SEQ ID NO: 42337 - DNA, 41 bp, Emericella nidulans
gttctcgagacgagcgatcgcgctcggcgtgcaggttccac

SEQ ID NO: 42338 - DNA, 47 bp, Emericella nidulans
gaattcactgcggccgccatgattatactgggatcaactaccctctt

SEQ ID NO: 42339 - DNA, 48 bp, Emericella nidulans
gttctcgagacgagcgatcgcatataaagaataatcaggacataccat

SEQ ID NO: 42340 - DNA, 48 bp, Emericella nidulans
gaattcactgcggccgccatgatatcaactgactggacctcactctcg

SEQ ID NO: 42341 - DNA, 49 bp, Emericella nidulans
gttctcgagacgagcgatcgcggtttgtttacgttgatctggcccatac

SEQ ID NO: 42342 - DNA, 48 bp, Emericella nidulans
gaattcactgcggccgccatggccagaatctgttcgataacgtgctca

SEQ ID NO: 42343 - DNA, 44 bp, Emericella nidulans
gttctcgagacgagcgatcgcacgcacatcttcgacggtggtct

SEQ ID NO: 42344 - DNA, 39 bp, Emericella nidulans
gaattcactgcggccgccatgatcagaatggcggctttg

SEQ ID NO: 42345 - DNA, 43 bp, Emericella nidulans
gttctcgagacgagcgatcgcgctgtattgagtggaatggatg

SEQ ID NO: 42346 - DNA, 44 bp, Emericella nidulans
gaattcactgcggccgccatgcctcatctccggcgagataccaa

SEQ ID NO: 42347 - DNA, 49 bp, Emericella nidulans
gttctcgagacgagcgatcgcatgtgatgttataacctacggagcatgg

SEQ ID NO: 42348 - DNA, 49 bp, Emericella nidulans
gaattcactgcggccgccatgccttccatacaagatacaggctctttga

SEQ ID NO: 42349 - DNA, 49 bp, Emericella nidulans
gttctcgagacgagcgatcgcagtaggaaaggttgaaggttgctaggac

SEQ ID NO: 42350 - DNA, 41 bp, Emericella nidulans
gaattcactgcggccgccatgatcgacgaccgcctggcgta

SEQ ID NO: 42351 - DNA, 41 bp, Emericella nidulans
gttctcgagacgagcgatcgcgcggcacatcatgcgtgaca

SEQ ID NO: 42352 - DNA, 43 bp, Emericella nidulans
gaattcactgcggccgccatggccacaccacctccaacagctc

SEQ ID NO: 42353 - DNA, 41 bp, Emericella nidulans
gttctcgagacgagcgatcgccccgccttacacggctgctc

SEQ ID NO: 42354 - DNA, 41 bp, Emericella nidulans
gaattcactgcggccgccatgggcgacccccgttgaggatt

SEQ ID NO: 42355 - DNA, 45 bp, Emericella nidulans
gttctcgagacgagcgatcgcacctttgcggacagtgttatctcg

SEQ ID NO: 42356 - DNA, 49 bp, Emericella nidulans
gaattcactgcggccgccatgagtggcttttaaagcacaatgtccaacc

SEQ ID NO: 42357 - DNA, 45 bp, Emericella nidulans
gttctcgagacgagcgatcgcccctcatggctcaccatgtactgc

SEQ ID NO: 42358 - DNA, 43 bp, Emericella nidulans
gaattcactgcggccgccatgctcgaacgagcaaaatcccttg

SEQ ID NO: 42359 - DNA, 40 bp, Emericella nidulans
gttctcgagacgagcgatcgccggctgactccgccccatt

SEQ ID NO: 42360 - DNA, 41 bp, Emericella nidulans
gaattcactgcggccgccatgttcccaagtacaggctctgg

SEQ ID NO: 42361 - DNA, 41 bp, Emericella nidulans
gttctcgagacgagcgatcgccgctcctttccatctttgaa

SEQ ID NO: 42362 - DNA, 49 bp, Emericella nidulans
gaattcactgcggccgccatggtaccgccatctcctcttcaatcgcctc

SEQ ID NO: 42363 - DNA, 49 bp, Emericella nidulans
gttctcgagacgagcgatcgctagagtttgagctggaaatgcggccatc

SEQ ID NO: 42364 - DNA, 42 bp, Emericella nidulans
gaattcactgcggccgccatgacgacgacgggcgagctcaga

SEQ ID NO: 42365 - DNA, 45 bp, Emericella nidulans
gttctcgagacgagcgatcgcgacgatcgcgcttgaatttgatcc

SEQ ID NO: 42366 - DNA, 48 bp, Emericella nidulans
gaattcactgcggccgccatgtgcctcttacaaggatcttggttctgc

SEQ ID NO: 42367 - DNA, 43 bp, Emericella nidulans
gttctcgagacgagcgatcgccgagagtggttccggctgagtg

SEQ ID NO: 42368 - DNA, 48 bp, Emericella nidulans
gaattcactgcggccgccatgactgtacttccgttccacaccttcacc

SEQ ID NO: 42369 - DNA, 48 bp, Emericella nidulans
gttctcgagacgagcgatcgcctcctgctcccatgtgatgtacgagtc

SEQ ID NO: 42370 - DNA, 44 bp, Emericella nidulans
gaattcactgcggccgccatgccgatctatttcccatcggagga

SEQ ID NO: 42371 - DNA, 49 bp, Emericella nidulans
gttctcgagacgagcgatcgcacttgtaaccttctttaggtcgctctgc

SEQ ID NO: 42372 - DNA, 41 bp, Emericella nidulans
gaattcactgcggccgccatgactcactgccatttgtgctg

SEQ ID NO: 42373 - DNA, 44 bp, Emericella nidulans
gttctcgagacgagcgatcgcggaaccaattatatcgatcacga

SEQ ID NO: 42374 - DNA, 48 bp, Emericella nidulans
gaattcactgcggccgccatggtacttatcatgttgtatgctaatgtg

SEQ ID NO: 42375 - DNA, 41 bp, Emericella nidulans
gttctcgagacgagcgatcgctcaccacaaccaccagtctc

SEQ ID NO: 42376 - DNA, 49 bp, Emericella nidulans
gaattcactgcggccgccatgtcatatccgttgtatgtatccccagtct

SEQ ID NO: 42377 - DNA, 41 bp, Emericella nidulans
gttctcgagacgagcgatcgcggctcgagggccaagggaaa

SEQ ID NO: 42378 - DNA, 41 bp, Emericella nidulans
gaattcactgcggccgccatgccccgcttcgaccccaactt

SEQ ID NO: 42379 - DNA, 46 bp, Emericella nidulans
gttctcgagacgagcgatcgccaccaagtcgtccttcacagcgaaa

SEQ ID NO: 42380 - DNA, 41 bp, Emericella nidulans
gaattcactgcggccgccatgccacgggcacgggaaaatca

SEQ ID NO: 42381 - DNA, 41 bp, Emericella nidulans
gttctcgagacgagcgatcgccatgcggcttgcttcggaca

SEQ ID NO: 42382 - DNA, 41 bp, Emericella nidulans
gaattcactgcggccgccatgttgatactgcgtgctcttcg

SEQ ID NO: 42383 - DNA, 41 bp, Emericella nidulans
gttctcgagacgagcgatcgctgcgacccgtgtactcttct

SEQ ID NO: 42384 - DNA, 41 bp, Emericella nidulans
gaattcactgcggccgccatgcgagctggggatggcacacc

SEQ ID NO: 42385 - DNA, 43 bp, Emericella nidulans
gttctcgagacgagcgatcgcttatcccagattgcgacaccgt

SEQ ID NO: 42386 - DNA, 42 bp, Emericella nidulans
gaattcactgcggccgccatgcaacaagcgtttttctttgag

SEQ ID NO: 42387 - DNA, 41 bp, Emericella nidulans
gttctcgagacgagcgatcgctccttgttttcagcatctcg

SEQ ID NO: 42388 - DNA, 46 bp, Emericella nidulans
gaattcactgcggccgccatgcagctccagcgtcaacaaagaatgc

SEQ ID NO: 42389 - DNA, 49 bp, Emericella nidulans
gttctcgagacgagcgatcgctcctccctctttgattaccgatttaagc

SEQ ID NO: 42390 - DNA, 49 bp, Emericella nidulans
gaattcactgcggccgccatgtcaagcgactcttcgtctatcagcgtca

SEQ ID NO: 42391 - DNA, 46 bp, Emericella nidulans
gttctcgagacgagcgatcgccaccgtagaaaggatggctggaagg

SEQ ID NO: 42392 - DNA, 47 bp, Emericella nidulans
gaattcactgcggccgccatgcagagactccccgctatctcgtctca

SEQ ID NO: 42393 - DNA, 44 bp, Emericella nidulans
gttctcgagacgagcgatcgcaaggcccctcaaaaagctctccc

SEQ ID NO: 42394 - DNA, 41 bp, Emericella nidulans
gaattcactgcggccgccatgcatgggcagggcgaaacaca

SEQ ID NO: 42395 - DNA, 49 bp, Emericella nidulans
gttctcgagacgagcgatcgcgtccgatgaccttcgtttataatcctca

SEQ ID NO: 42396 - DNA, 41 bp, Emericella nidulans
gaattcactgcggccgccatgcacctacggagccaaatgat

SEQ ID NO: 42397 - DNA, 40 bp, Emericella nidulans
gttctcgagacgagcgatcgccacgccaacaccatagtcc

SEQ ID NO: 42398 - DNA, 44 bp, Emericella nidulans
gaattcactgcggccgccatgcaagagcatcccgaagccctgga

SEQ ID NO: 42399 - DNA, 49 bp, Emericella nidulans
gttctcgagacgagcgatcgcctctaagatatcgtagcgaggggccttt

SEQ ID NO: 42400 - DNA, 47 bp, Emericella nidulans
gaattcactgcggccgccatgtgatattcggacgccgaaaacacttc

SEQ ID NO: 42401 - DNA, 43 bp, Emericella nidulans
gttctcgagacgagcgatcgcaggacggcttccccagttgaga

SEQ ID NO: 42402 - DNA, 41 bp, Emericella nidulans
gaattcactgcggccgccatgcgtgggttggatgttcctaa

SEQ ID NO: 42403 - DNA, 49 bp, Emericella nidulans
gttctcgagacgagcgatcgcttacctagtaattctagtaggcggacga

SEQ ID NO: 42404 - DNA, 47 bp, Emericella nidulans
gaattcactgcggccgccatgcctctgccagtgattacctcaacaca

SEQ ID NO: 42405 - DNA, 49 bp, Emericella nidulans
gttctcgagacgagcgatcgctctcatagtacccttgttcggtgggctc

SEQ ID NO: 42406 - DNA, 44 bp, Emericella nidulans
gaattcactgcggccgccatggtaagtcaacgaacgctagaagc

SEQ ID NO: 42407 - DNA, 41 bp, Emericella nidulans
gttctcgagacgagcgatcgcgctgtgcctcccatattcat

SEQ ID NO: 42408 - DNA, 48 bp, Emericella nidulans
gaattcactgcggccgccatggaatacgtctatatgggaagccgatcc

SEQ ID NO: 42409 - DNA, 41 bp, Emericella nidulans
gttctcgagacgagcgatcgcccaaatcctgggggcgcaaa

SEQ ID NO: 42410 - DNA, 41 bp, Emericella nidulans
gaattcactgcggccgccatgcggctgggctcccattatcg

SEQ ID NO: 42411 - DNA, 41 bp, Emericella nidulans
gttctcgagacgagcgatcgctctcgccggtgtcagccaaa

SEQ ID NO: 42412 - DNA, 43 bp, Emericella nidulans
gaattcactgcggccgccatgaacctggagtgcatccaagcaa

SEQ ID NO: 42413 - DNA, 46 bp, Emericella nidulans
gttctcgagacgagcgatcgccgtctgaatacgaccctgaagagca

SEQ ID NO: 42414 - DNA, 44 bp, Emericella nidulans
gaattcactgcggccgccatgccaggctattctggtcccggtct

SEQ ID NO: 42415 - DNA, 41 bp, Emericella nidulans
gttctcgagacgagcgatcgccgggatgcaagacggtcagg

SEQ ID NO: 42416 - DNA, 48 bp, Emericella nidulans
gaattcactgcggccgccatgaacagctgctgactagccctacttttc

SEQ ID NO: 42417 - DNA, 41 bp, Emericella nidulans
gttctcgagacgagcgatcgcctgcgacaggccatcgtcaa

SEQ ID NO: 42418 - DNA, 45 bp, Emericella nidulans
gaattcactgcggccgccatgaccttgagtggctctgttccgaca

SEQ ID NO: 42419 - DNA, 44 bp, Emericella nidulans
gttctcgagacgagcgatcgcacaagtgtcaacgctgcaggaga

SEQ ID NO: 42420 - DNA, 44 bp, Emericella nidulans
gaattcactgcggccgccatgtctgattgttcttccccgtcctg

SEQ ID NO: 42421 - DNA, 43 bp, Emericella nidulans
gttctcgagacgagcgatcgcgagacctgcaggtgcgacaagc

SEQ ID NO: 42422 - DNA, 45 bp, Emericella nidulans
gaattcactgcggccgccatggtcgaaaaagcatgcaaggaagca

SEQ ID NO: 42423 - DNA, 45 bp, Emericella nidulans
gttctcgagacgagcgatcgcctctgaccggtgaaattgaagacc

SEQ ID NO: 42424 - DNA, 41 bp, Emericella nidulans
gaattcactgcggccgccatggcatcctggccgcctacacg

SEQ ID NO: 42425 - DNA, 42 bp, Emericella nidulans
gttctcgagacgagcgatcgcaggagagcgcagccgtaacca

SEQ ID NO: 42426 - DNA, 47 bp, Emericella nidulans
gaattcactgcggccgccatgcccaatacacttcgagggagacttca

SEQ ID NO: 42427 - DNA, 41 bp, Emericella nidulans
gttctcgagacgagcgatcgcagcccacatccaggggttgc

SEQ ID NO: 42428 - DNA, 45 bp, Emericella nidulans
gaattcactgcggccgccatgtgagcgtttcattgagggtgaagg

SEQ ID NO: 42429 - DNA, 46 bp, Emericella nidulans
gttctcgagacgagcgatcgcagcagaaggcgtaagcatggagtca

SEQ ID NO: 42430 - DNA, 42 bp, Emericella nidulans
gaattcactgcggccgccatggcgcaggaatgctcgcagttg

SEQ ID NO: 42431 - DNA, 41 bp, Emericella nidulans
gttctcgagacgagcgatcgctgccgccgcatacctccgta

SEQ ID NO: 42432 - DNA, 48 bp, Emericella nidulans
gaattcactgcggccgccatgaggttaactggggcattcgttttgtca

SEQ ID NO: 42433 - DNA, 44 bp, Emericella nidulans
gttctcgagacgagcgatcgctttagcggctcgagcttggtcat

SEQ ID NO: 42434 - DNA, 43 bp, Emericella nidulans
gaattcactgcggccgccatgctaggcggctacggagttaccg

SEQ ID NO: 42435 - DNA, 49 bp, Emericella nidulans
gttctcgagacgagcgatcgcatgggcctcctttcaagactatatgaac

SEQ ID NO: 42436 - DNA, 45 bp, Emericella nidulans
gaattcactgcggccgccatgtaggccattcgaacgaatgattgc

SEQ ID NO: 42437 - DNA, 48 bp, Emericella nidulans
gttctcgagacgagcgatcgcgtaaaaaggaacatgcgagggcagggt

SEQ ID NO: 42438 - DNA, 41 bp, Emericella nidulans
gaattcactgcggccgccatgctgccggtctggcactgctg

SEQ ID NO: 42439 - DNA, 44 bp, Emericella nidulans
gttctcgagacgagcgatcgcggttagcgttctccgtcatcgtc

SEQ ID NO: 42440 - DNA, 41 bp, Emericella nidulans
gaattcactgcggccgccatggcggaccacacgaacgtcca

SEQ ID NO: 42441 - DNA, 49 bp, Emericella nidulans
gttctcgagacgagcgatcgcgccatgctgacttataccagaaattcca

SEQ ID NO: 42442 - DNA, 41 bp, Emericella nidulans
gaattcactgcggccgccatgaccggggctactccggaccc

SEQ ID NO: 42443 - DNA, 41 bp, Emericella nidulans
gttctcgagacgagcgatcgccgtcactcgcgtgcccattc

SEQ ID NO: 42444 - DNA, 41 bp, Emericella nidulans
gaattcactgcggccgccatgacgcaagcaagatggaagac

SEQ ID NO: 42445 - DNA, 44 bp, Emericella nidulans
gttctcgagacgagcgatcgcagtagattaccgcatatccacga

SEQ ID NO: 42446 - DNA, 42 bp, Emericella nidulans
gaattcactgcggccgccatgtggaggttgttgatattgggt

SEQ ID NO: 42447 - DNA, 41 bp, Emericella nidulans
gttctcgagacgagcgatcgctccgggttactcttcctcct

SEQ ID NO: 42448 - DNA, 45 bp, Emericella nidulans
gaattcactgcggccgccatggcaacctccaggacgacaaaagca

SEQ ID NO: 42449 - DNA, 45 bp, Emericella nidulans
gttctcgagacgagcgatcgcgccaatacgtaccctccaaacaaa

SEQ ID NO: 42450 - DNA, 41 bp, Emericella nidulans
gaattcactgcggccgccatgcgtgcagaagacgccgcaaa

SEQ ID NO: 42451 - DNA, 44 bp, Emericella nidulans
gttctcgagacgagcgatcgcgtattcaacaccgtcgccgcatc

SEQ ID NO: 42452 - DNA, 45 bp, Emericella nidulans
gaattcactgcggccgccatgttgttcttggtggccctgctatgc

SEQ ID NO: 42453 - DNA, 41 bp, Emericella nidulans
gttctcgagacgagcgatcgcttgccatcgcccgaccatct

SEQ ID NO: 42454 - DNA, 45 bp, Emericella nidulans
gaattcactgcggccgccatgggattcattgatttcatgtctctg

SEQ ID NO: 42455 - DNA, 41 bp, Emericella nidulans
gttctcgagacgagcgatcgcgtcaaatgtcgcttcatcca

SEQ ID NO: 42456 - DNA, 49 bp, Emericella nidulans
gaattcactgcggccgccatgtaatgttcccagtactccttccaaaatg

SEQ ID NO: 42457 - DNA, 44 bp, Emericella nidulans
gttctcgagacgagcgatcgccgcgagctggtcatttctccgta

SEQ ID NO: 42458 - DNA, 42 bp, Emericella nidulans
gaattcactgcggccgccatgtgatccggtacccgtcagtcg

SEQ ID NO: 42459 - DNA, 41 bp, Emericella nidulans
gttctcgagacgagcgatcgctcctccggccagcggtgtag

SEQ ID NO: 42460 - DNA, 49 bp, Emericella nidulans
gaattcactgcggccgccatgactcaggatgacagagatgtatgactcg

SEQ ID NO: 42461 - DNA, 45 bp, Emericella nidulans
gttctcgagacgagcgatcgcttcggaatgaatcttcgtctgcac

SEQ ID NO: 42462 - DNA, 47 bp, Emericella nidulans
gaattcactgcggccgccatgccccactggtcttttcggtatgatga

SEQ ID NO: 42463 - DNA, 41 bp, Emericella nidulans
gttctcgagacgagcgatcgcggcaccgcccagtcccagat

SEQ ID NO: 42464 - DNA, 49 bp, Emericella nidulans
gaattcactgcggccgccatggacagctactgcttgatgtcgccaggga

SEQ ID NO: 42465 - DNA, 47 bp, Emericella nidulans
gttctcgagacgagcgatcgccacttccattgagcttccacgctttc

SEQ ID NO: 42466 - DNA, 47 bp, Emericella nidulans
gaattcactgcggccgccatggtgaacctggacaatgtccgaacagc

SEQ ID NO: 42467 - DNA, 41 bp, Emericella nidulans
gttctcgagacgagcgatcgcggtgacagcgtctgcgaggg

SEQ ID NO: 42468 - DNA, 47 bp, Emericella nidulans
gaattcactgcggccgccatgaggaggctacacgaaaatcggtatca

SEQ ID NO: 42469 - DNA, 41 bp, Emericella nidulans
gttctcgagacgagcgatcgccagctggtgctggacggctc

SEQ ID NO: 42470 - DNA, 49 bp, Emericella nidulans
gaattcactgcggccgccatgaatcactgaagctagagagatggcattg

SEQ ID NO: 42471 - DNA, 42 bp, Emericella nidulans
gttctcgagacgagcgatcgcgaaagcgagccgtcgggtcaa

SEQ ID NO: 42472 - DNA, 42 bp, Emericella nidulans
gaattcactgcggccgccatgcggcgacaagcctgtgcaaaa

SEQ ID NO: 42473 - DNA, 41 bp, Emericella nidulans
gttctcgagacgagcgatcgcaggctgcaacgggggaggaa

SEQ ID NO: 42474 - DNA, 45 bp, Emericella nidulans
gaattcactgcggccgccatgcccgaatatgcgcgatatcaatgg

SEQ ID NO: 42475 - DNA, 44 bp, Emericella nidulans
gttctcgagacgagcgatcgcgcgtgcgcccgtggatatcttta

SEQ ID NO: 42476 - DNA, 49 bp, Emericella nidulans
gaattcactgcggccgccatgtactcaattacttgactgcaccgaatgt

SEQ ID NO: 42477 - DNA, 46 bp, Emericella nidulans
gttctcgagacgagcgatcgccttgtcaagctcgatctcaatagcg

SEQ ID NO: 42478 - DNA, 49 bp, Emericella nidulans
gaattcactgcggccgccatgaacgtgactactggaaaagccttcaggt

SEQ ID NO: 42479 - DNA, 49 bp, Emericella nidulans
gttctcgagacgagcgatcgcaagttttggaacaagatcagagcgaccc

SEQ ID NO: 42480 - DNA, 43 bp, Emericella nidulans
gaattcactgcggccgccatgccaaccagccattttgccaacc

SEQ ID NO: 42481 - DNA, 43 bp, Emericella nidulans
gttctcgagacgagcgatcgcgccctgctgtcctgaacgcact

SEQ ID NO: 42482 - DNA, 41 bp, Emericella nidulans
gaattcactgcggccgccatgctcccggcaagccaaatccc

SEQ ID NO: 42483 - DNA, 45 bp, Emericella nidulans
gttctcgagacgagcgatcgccaaaacacctctcgcaacccgact

SEQ ID NO: 42484 - DNA, 41 bp, Emericella nidulans
gaattcactgcggccgccatggcccgggcatgaccttctcc

SEQ ID NO: 42485 - DNA, 43 bp, Emericella nidulans
gttctcgagacgagcgatcgcgatacggtgagctgccggggtc

SEQ ID NO: 42486 - DNA, 41 bp, Emericella nidulans
gaattcactgcggccgccatgctgccgcactgcggaaagag

SEQ ID NO: 42487 - DNA, 44 bp, Emericella nidulans
gttctcgagacgagcgatcgcgttcgtcttggaggacggagaga

SEQ ID NO: 42488 - DNA, 49 bp, Emericella nidulans
gaattcactgcggccgccatgtttgcaaataagattatcgcaactgaca

SEQ ID NO: 42489 - DNA, 45 bp, Emericella nidulans
gttctcgagacgagcgatcgcactcccgccaccaaaacaataacg

SEQ ID NO: 42490 - DNA, 46 bp, Emericella nidulans
gaattcactgcggccgccatgctgcgtaaagttgaggcatgtcttg

SEQ ID NO: 42491 - DNA, 49 bp, Emericella nidulans
gttctcgagacgagcgatcgctagtcgatcggtttgtttccaaacttgt

SEQ ID NO: 42492 - DNA, 43 bp, Emericella nidulans
gaattcactgcggccgccatggtgaagtgcctcgtgtgggagg

SEQ ID NO: 42493 - DNA, 44 bp, Emericella nidulans
gttctcgagacgagcgatcgccctcgtgatcggagtggatggtg

SEQ ID NO: 42494 - DNA, 47 bp, Emericella nidulans
gaattcactgcggccgccatgttactgaaacgtactttgctggagaa

SEQ ID NO: 42495 - DNA, 41 bp, Emericella nidulans
gttctcgagacgagcgatcgcgctgattcagccattccata

SEQ ID NO: 42496 - DNA, 49 bp, Emericella nidulans
gaattcactgcggccgccatgctcttcacggtgaccatgtggaagatga

SEQ ID NO: 42497 - DNA, 41 bp, Emericella nidulans
gttctcgagacgagcgatcgcgccccactgcacgctggtta

SEQ ID NO: 42498 - DNA, 45 bp, Emericella nidulans
gaattcactgcggccgccatgtcgtttgttaggacgctgctcgac

SEQ ID NO: 42499 - DNA, 49 bp, Emericella nidulans
gttctcgagacgagcgatcgcatccagacaataggtaacagcgacattg

SEQ ID NO: 42500 - DNA, 40 bp, Emericella nidulans
gaattcactgcggccgccatgcgccgcggaatggaagacc

SEQ ID NO: 42501 - DNA, 41 bp, Emericella nidulans
gttctcgagacgagcgatcgcttcggcgggaatcagcgact

SEQ ID NO: 42502 - DNA, 49 bp, Emericella nidulans
gaattcactgcggccgccatgcccttcccttttacaactcctttctagc

SEQ ID NO: 42503 - DNA, 49 bp, Emericella nidulans
gttctcgagacgagcgatcgcgagtaaagggagtaacatctgcgtgaag

SEQ ID NO: 42504 - DNA, 42 bp, Emericella nidulans
gaattcactgcggccgccatgcgctccttatctccccgccac

SEQ ID NO: 42505 - DNA, 41 bp, Emericella nidulans
gttctcgagacgagcgatcgcagcggcggcagcctccttag

SEQ ID NO: 42506 - DNA, 49 bp, Emericella nidulans
gaattcactgcggccgccatgctcatctatacaacaaccgaccgcgaac

SEQ ID NO: 42507 - DNA, 45 bp, Emericella nidulans
gttctcgagacgagcgatcgcccctcctatcaatgagcgttttcg

SEQ ID NO: 42508 - DNA, 41 bp, Emericella nidulans
gaattcactgcggccgccatgtgaccaagatgagctgttgc

SEQ ID NO: 42509 - DNA, 41 bp, Emericella nidulans
gttctcgagacgagcgatcgctcacgtcacaatccttcagc

SEQ ID NO: 42510 - DNA, 41 bp, Emericella nidulans
gaattcactgcggccgccatgaccagccgtcggtagttcag

SEQ ID NO: 42511 - DNA, 41 bp, Emericella nidulans
gttctcgagacgagcgatcgcgttgcaaaaccgctccttat

SEQ ID NO: 42512 - DNA, 47 bp, Emericella nidulans
gaattcactgcggccgccatgggacgccgttacctacagtgagttcc

SEQ ID NO: 42513 - DNA, 49 bp, Emericella nidulans
gttctcgagacgagcgatcgcagaagatatttcaggttcggcagcgtgt

SEQ ID NO: 42514 - DNA, 43 bp, Emericella nidulans
gaattcactgcggccgccatgacctctgaaccccgaggatgtt

SEQ ID NO: 42515 - DNA, 41 bp, Emericella nidulans
gttctcgagacgagcgatcgctgcgtgcgtggaactgggtc

SEQ ID NO: 42516 - DNA, 42 bp, Emericella nidulans
gaattcactgcggccgccatgcggcggctacggacaggatct

SEQ ID NO: 42517 - DNA, 42 bp, Emericella nidulans
gttctcgagacgagcgatcgcgcctcgatcagcccgaaatgg

SEQ ID NO: 42518 - DNA, 45 bp, Emericella nidulans
gaattcactgcggccgccatgatacgtccgtctcttcggccaacc

SEQ ID NO: 42519 - DNA, 41 bp, Emericella nidulans
gttctcgagacgagcgatcgcggtcaggcgacgcccaacag

SEQ ID NO: 42520 - DNA, 40 bp, Emericella nidulans
gaattcactgcggccgccatgcaagaagaacgcggtacat

SEQ ID NO: 42521 - DNA, 41 bp, Emericella nidulans
gttctcgagacgagcgatcgcatgcgcttttcttggacgat

SEQ ID NO: 42522 - DNA, 42 bp, Emericella nidulans
gaattcactgcggccgccatgtccgcgtttgcaggcaaagaa

SEQ ID NO: 42523 - DNA, 49 bp, Emericella nidulans
gttctcgagacgagcgatcgcaatctcttctagccattgtacacggtcc

SEQ ID NO: 42524 - DNA, 41 bp, Emericella nidulans
gaattcactgcggccgccatgtcactcggtgcgtcggcaat

SEQ ID NO: 42525 - DNA, 49 bp, Emericella nidulans
gttctcgagacgagcgatcgcgggtcgttgggtatgttgtcagtaaacg

SEQ ID NO: 42526 - DNA, 49 bp, Emericella nidulans
gaattcactgcggccgccatgctcatagggacaaaatcatcaccggttc

SEQ ID NO: 42527 - DNA, 44 bp, Emericella nidulans
gttctcgagacgagcgatcgctgcttgagcgtcaaaaaccttga

SEQ ID NO: 42528 - DNA, 41 bp, Emericella nidulans
gaattcactgcggccgccatggcccaggggcacgcgatttt

SEQ ID NO: 42529 - DNA, 41 bp, Emericella nidulans
gttctcgagacgagcgatcgcgccctcgacgggatcgttca

SEQ ID NO: 42530 - DNA, 49 bp, Emericella nidulans
gaattcactgcggccgccatgcctagccaagaaactataacagcacctg

SEQ ID NO: 42531 - DNA, 46 bp, Emericella nidulans
gttctcgagacgagcgatcgcccaggtaccaaagtgcttcactcag

SEQ ID NO: 42532 - DNA, 41 bp, Emericella nidulans
gaattcactgcggccgccatgatttccctgcttatcgggtc

SEQ ID NO: 42533 - DNA, 42 bp, Emericella nidulans
gttctcgagacgagcgatcgccctgtattggaatggtcatgg

SEQ ID NO: 42534 - DNA, 45 bp, Emericella nidulans
gaattcactgcggccgccatgatccggactgcttgctcttcttca

SEQ ID NO: 42535 - DNA, 44 bp, Emericella nidulans
gttctcgagacgagcgatcgccacccacatgtccattagctccc

SEQ ID NO: 42536 - DNA, 45 bp, Emericella nidulans
gaattcactgcggccgccatgaaagctgaaatatgcgctgcagga

SEQ ID NO: 42537 - DNA, 44 bp, Emericella nidulans
gttctcgagacgagcgatcgcgccaatccagtgcggatctagtg

SEQ ID NO: 42538 - DNA, 48 bp, Emericella nidulans
gaattcactgcggccgccatggaagaaccctgagctattccagcgagt

SEQ ID NO: 42539 - DNA, 48 bp, Emericella nidulans
gttctcgagacgagcgatcgccaacttctggtattcgagcttgccttc

SEQ ID NO: 42540 - DNA, 46 bp, Emericella nidulans
gaattcactgcggccgccatgtatccagccaaaggatcaatcagga

SEQ ID NO: 42541 - DNA, 43 bp, Emericella nidulans
gttctcgagacgagcgatcgccgtattgcagcggctggttctc

SEQ ID NO: 42542 - DNA, 49 bp, Emericella nidulans
gaattcactgcggccgccatgcaacatccgctgacatttcatgataaac

SEQ ID NO: 42543 - DNA, 41 bp, Emericella nidulans
gttctcgagacgagcgatcgctacgccccatcgccatcagc

SEQ ID NO: 42544 - DNA, 43 bp, Emericella nidulans
gaattcactgcggccgccatgagagttgggccttgttccgaca

SEQ ID NO: 42545 - DNA, 40 bp, Emericella nidulans
gttctcgagacgagcgatcgcccgagagcacccgccgtat

SEQ ID NO: 42546 - DNA, 41 bp, Emericella nidulans
gaattcactgcggccgccatgcttctgcccactggatctgt

SEQ ID NO: 42547 - DNA, 42 bp, Emericella nidulans
gttctcgagacgagcgatcgctgaccctgatagatccacaca

SEQ ID NO: 42548 - DNA, 48 bp, Emericella nidulans
gaattcactgcggccgccatgtatgtttcacctgatggctcggacgat

SEQ ID NO: 42549 - DNA, 45 bp, Emericella nidulans
gttctcgagacgagcgatcgctagcggagatacggggatggactg

SEQ ID NO: 42550 - DNA, 45 bp, Emericella nidulans
gaattcactgcggccgccatgatttataacagctcgttattgtcg

SEQ ID NO: 42551 - DNA, 41 bp, Emericella nidulans
gttctcgagacgagcgatcgcgcttgccatctgtagggaca

SEQ ID NO: 42552 - DNA, 41 bp, Emericella nidulans
gaattcactgcggccgccatgatctgcgccgccagttccat

SEQ ID NO: 42553 - DNA, 41 bp, Emericella nidulans
gttctcgagacgagcgatcgccgagggacgctggcagcaat

SEQ ID NO: 42554 - DNA, 42 bp, Emericella nidulans
gaattcactgcggccgccatgtccaccagcttgcagccttgc

SEQ ID NO: 42555 - DNA, 46 bp, Emericella nidulans
gttctcgagacgagcgatcgctttggcttcgatacaaaaagctgga

SEQ ID NO: 42556 - DNA, 41 bp, Emericella nidulans
gaattcactgcggccgccatgctcagcgacgcggcctcatt

SEQ ID NO: 42557 - DNA, 47 bp, Emericella nidulans
gttctcgagacgagcgatcgcaactgtgtctaagccgatcttgtcca

SEQ ID NO: 42558 - DNA, 48 bp, Emericella nidulans
gaattcactgcggccgccatgctaaacttctacctaccccggtcaaca

SEQ ID NO: 42559 - DNA, 44 bp, Emericella nidulans
gttctcgagacgagcgatcgcccagctcctccatggaaatgtcg

SEQ ID NO: 42560 - DNA, 40 bp, Emericella nidulans
gaattcactgcggccgccatgggagcctggtggcactaat

SEQ ID NO: 42561 - DNA, 41 bp, Emericella nidulans
gttctcgagacgagcgatcgcgatgcgagctttgaggatct

SEQ ID NO: 42562 - DNA, 39 bp, Emericella nidulans
gaattcactgcggccgccatggacaagcgaatgcgacct

SEQ ID NO: 42563 - DNA, 41 bp, Emericella nidulans
gttctcgagacgagcgatcgcatccacatttcggtgcttgt

SEQ ID NO: 42564 - DNA, 44 bp, Emericella nidulans
gaattcactgcggccgccatgggacaccactgatccaggcttca

SEQ ID NO: 42565 - DNA, 41 bp, Emericella nidulans
gttctcgagacgagcgatcgcgccttgccacagcctcatgg

SEQ ID NO: 42566 - DNA, 48 bp, Emericella nidulans
gaattcactgcggccgccatggctcatacgtataggaatgccacagga

SEQ ID NO: 42567 - DNA, 44 bp, Emericella nidulans
gttctcgagacgagcgatcgccggttattggaatgagggtgtcg

SEQ ID NO: 42568 - DNA, 41 bp, Emericella nidulans
gaattcactgcggccgccatgagcctcgaagagacaacagc

SEQ ID NO: 42569 - DNA, 42 bp, Emericella nidulans
gttctcgagacgagcgatcgccttttcgctgagctacaactg

SEQ ID NO: 42570 - DNA, 41 bp, Emericella nidulans
gaattcactgcggccgccatgcggacgagaagaaagacgac

SEQ ID NO: 42571 - DNA, 46 bp, Emericella nidulans
gttctcgagacgagcgatcgcgtccagtactacttggcgtattgtt

SEQ ID NO: 42572 - DNA, 41 bp, Emericella nidulans
gaattcactgcggccgccatggttctcgacgctatgcttcc

SEQ ID NO: 42573 - DNA, 44 bp, Emericella nidulans
gttctcgagacgagcgatcgccaagcttaatcagaccgttactt

SEQ ID NO: 42574 - DNA, 49 bp, Emericella nidulans
gaattcactgcggccgccatgttgggttagtaaaaagccgttctattcg

SEQ ID NO: 42575 - DNA, 48 bp, Emericella nidulans
gttctcgagacgagcgatcgcgtttgttggatccgtaacatatgggat

SEQ ID NO: 42576 - DNA, 49 bp, Emericella nidulans
gaattcactgcggccgccatggatggatcatacagattcaagccagaag

SEQ ID NO: 42577 - DNA, 41 bp, Emericella nidulans
gttctcgagacgagcgatcgctttgcgtacccgccccaatc

SEQ ID NO: 42578 - DNA, 41 bp, Emericella nidulans
gaattcactgcggccgccatgcagcagcagcagcagcaacc

SEQ ID NO: 42579 - DNA, 41 bp, Emericella nidulans
gttctcgagacgagcgatcgccggacccagcccgttcgatt

SEQ ID NO: 42580 - DNA, 41 bp, Emericella nidulans
gaattcactgcggccgccatgctcaaacttggcccagtgaa

SEQ ID NO: 42581 - DNA, 41 bp, Emericella nidulans
gttctcgagacgagcgatcgcatttgttcccatgcttggat

SEQ ID NO: 42582 - DNA, 41 bp, Emericella nidulans
gaattcactgcggccgccatgactgtcgcacctgtcctacc

SEQ ID NO: 42583 - DNA, 41 bp, Emericella nidulans
gttctcgagacgagcgatcgcattggtcataagggcaaaaa

SEQ ID NO: 42584 - DNA, 45 bp, Emericella nidulans
gaattcactgcggccgccatgagctgttctgccttaacggcttcg

SEQ ID NO: 42585 - DNA, 41 bp, Emericella nidulans
gttctcgagacgagcgatcgctgcaaacagacccgcgatca

SEQ ID NO: 42586 - DNA, 49 bp, Emericella nidulans
gaattcactgcggccgccatgaaacgaaatcctctcgttcattacaagg

SEQ ID NO: 42587 - DNA, 41 bp, Emericella nidulans
gttctcgagacgagcgatcgcgcgctttgccttgggagctg

SEQ ID NO: 42588 - DNA, 48 bp, Emericella nidulans
gaattcactgcggccgccatgaatggcgtttataagaactcagaccgt

SEQ ID NO: 42589 - DNA, 41 bp, Emericella nidulans
gttctcgagacgagcgatcgcctccggtacgccaccgaacg

SEQ ID NO: 42590 - DNA, 42 bp, Emericella nidulans
gaattcactgcggccgccatgtctcgactcgctgaatctctc

SEQ ID NO: 42591 - DNA, 41 bp, Emericella nidulans
gttctcgagacgagcgatcgcagctggtcgttgatggtctc

SEQ ID NO: 42592 - DNA, 49 bp, Emericella nidulans
gaattcactgcggccgccatggtgacattgaaacacacaccaaaactcg

SEQ ID NO: 42593 - DNA, 43 bp, Emericella nidulans
gttctcgagacgagcgatcgcagttggcgcagctctcgactca

SEQ ID NO: 42594 - DNA, 44 bp, Emericella nidulans
gaattcactgcggccgccatgattgtgctgtaaacggcgcacca

SEQ ID NO: 42595 - DNA, 45 bp, Emericella nidulans
gttctcgagacgagcgatcgccaagcatcaatgcggtcatagtcg

SEQ ID NO: 42596 - DNA, 41 bp, Emericella nidulans
gaattcactgcggccgccatgggttcgattttggtggtgat

SEQ ID NO: 42597 - DNA, 40 bp, Emericella nidulans
gttctcgagacgagcgatcgcgggccttgacggatatgat

SEQ ID NO: 42598 - DNA, 42 bp, Emericella nidulans
gaattcactgcggccgccatggcccccatcaatcccaagtcc

SEQ ID NO: 42599 - DNA, 42 bp, Emericella nidulans
gttctcgagacgagcgatcgcatggaaccaccgatccagacg

SEQ ID NO: 42600 - DNA, 49 bp, Emericella nidulans
gaattcactgcggccgccatgcgcgttggatgcatctatacaccccttg

SEQ ID NO: 42601 - DNA, 41 bp, Emericella nidulans
gttctcgagacgagcgatcgcgcagatctcgccggtgaccc

SEQ ID NO: 42602 - DNA, 49 bp, Emericella nidulans
gaattcactgcggccgccatgaaccagactgcttatctcctcttcacca

SEQ ID NO: 42603 - DNA, 46 bp, Emericella nidulans
gttctcgagacgagcgatcgctcaatttcacccagctcaactctgc

SEQ ID NO: 42604 - DNA, 44 bp, Emericella nidulans
gaattcactgcggccgccatgagtccggacttctgccgggcttc

SEQ ID NO: 42605 - DNA, 41 bp, Emericella nidulans
gttctcgagacgagcgatcgcagcgggcacggagtcgagtt

SEQ ID NO: 42606 - DNA, 49 bp, Emericella nidulans
gaattcactgcggccgccatgcatgcaacaacatatcctcttctgggac

SEQ ID NO: 42607 - DNA, 41 bp, Emericella nidulans
gttctcgagacgagcgatcgcggaccagccctggggagact

SEQ ID NO: 42608 - DNA, 41 bp, Emericella nidulans
gaattcactgcggccgccatgtgtcgagacttgacgaaacg

SEQ ID NO: 42609 - DNA, 39 bp, Emericella nidulans
gttctcgagacgagcgatcgccgaggcaaccttcccact

SEQ ID NO: 42610 - DNA, 45 bp, Emericella nidulans
gaattcactgcggccgccatgggaggtttaccaacagcgacgaca

SEQ ID NO: 42611 - DNA, 42 bp, Emericella nidulans
gttctcgagacgagcgatcgcgcataggcaactggcgaccca

SEQ ID NO: 42612 - DNA, 49 bp, Emericella nidulans
gaattcactgcggccgccatggagtatctctcaactcgaccaaaatgct

SEQ ID NO: 42613 - DNA, 41 bp, Emericella nidulans
gttctcgagacgagcgatcgcggcacgctgcgagtggtgaa

SEQ ID NO: 42614 - DNA, 45 bp, Emericella nidulans
gaattcactgcggccgccatgattcccggcttcgatcctctatgg

SEQ ID NO: 42615 - DNA, 41 bp, Emericella nidulans
gttctcgagacgagcgatcgctgacggacgccaggttggtc

SEQ ID NO: 42616 - DNA, 39 bp, Emericella nidulans
gaattcactgcggccgccatgttctgcaattgcgtgacc

SEQ ID NO: 42617 - DNA, 41 bp, Emericella nidulans
gttctcgagacgagcgatcgcaacagtgggaccaaccagag

SEQ ID NO: 42618 - DNA, 49 bp, Emericella nidulans
gaattcactgcggccgccatgaagcctgtctcgatcatgaatcacatcc

SEQ ID NO: 42619 - DNA, 41 bp, Emericella nidulans
gttctcgagacgagcgatcgcccaacgccgcaatcgcaata

SEQ ID NO: 42620 - DNA, 49 bp, Emericella nidulans
gaattcactgcggccgccatgtcaaggagaagttgtacattggcgaggc

SEQ ID NO: 42621 - DNA, 45 bp, Emericella nidulans
gttctcgagacgagcgatcgcacatgcgactcttccgtcttctcc

SEQ ID NO: 42622 - DNA, 41 bp, Emericella nidulans
gaattcactgcggccgccatgcaccgaggggagatgcgaca

SEQ ID NO: 42623 - DNA, 43 bp, Emericella nidulans
gttctcgagacgagcgatcgcagtggcggcttgagttgagtcc

SEQ ID NO: 42624 - DNA, 49 bp, Emericella nidulans
gaattcactgcggccgccatggacatgcaaccctatcaatcgtctttcg

SEQ ID NO: 42625 - DNA, 41 bp, Emericella nidulans
gttctcgagacgagcgatcgcgccagtccctcctggccctc

SEQ ID NO: 42626 - DNA, 49 bp, Emericella nidulans
gaattcactgcggccgccatgcagatatacagaaggcactggccccaaa

SEQ ID NO: 42627 - DNA, 49 bp, Emericella nidulans
gttctcgagacgagcgatcgcatataggcctgcttcttccagtttcttc

SEQ ID NO: 42628 - DNA, 41 bp, Emericella nidulans
gaattcactgcggccgccatgtcgccgcggaatggtagtca

SEQ ID NO: 42629 - DNA, 49 bp, Emericella nidulans
gttctcgagacgagcgatcgctctacgcagtgctagaaaagcccggaca

SEQ ID NO: 42630 - DNA, 41 bp, Emericella nidulans
gaattcactgcggccgccatgctgtgcgtcaaggcgctccc

SEQ ID NO: 42631 - DNA, 41 bp, Emericella nidulans
gttctcgagacgagcgatcgcgcgggtggagttgcgtctcg

SEQ ID NO: 42632 - DNA, 42 bp, Emericella nidulans
gaattcactgcggccgccatgcgaattcggcgagggctccta

SEQ ID NO: 42633 - DNA, 48 bp, Emericella nidulans
gttctcgagacgagcgatcgcgttccagtgataatgttgccgtagctt

SEQ ID NO: 42634 - DNA, 42 bp, Emericella nidulans
gaattcactgcggccgccatgtccacaggcagcaacaagcct

SEQ ID NO: 42635 - DNA, 46 bp, Emericella nidulans
gttctcgagacgagcgatcgccacgagtcattagggcaacacatgc

SEQ ID NO: 42636 - DNA, 41 bp, Emericella nidulans
gaattcactgcggccgccatgcggtgggcctggagggtcta

SEQ ID NO: 42637 - DNA, 48 bp, Emericella nidulans
gttctcgagacgagcgatcgccaaccagtctcagcaaggaagtcatgc

SEQ ID NO: 42638 - DNA, 43 bp, Emericella nidulans
gaattcactgcggccgccatgggtatccagaaaagtcgtttgc

SEQ ID NO: 42639 - DNA, 41 bp, Emericella nidulans
gttctcgagacgagcgatcgcgtctgttcggggaatgatgt

SEQ ID NO: 42640 - DNA, 45 bp, Emericella nidulans
gaattcactgcggccgccatgccttgagtcctcaaagcgcccaga

SEQ ID NO: 42641 - DNA, 42 bp, Emericella nidulans
gttctcgagacgagcgatcgcgcctggcatctcgctcgcagt

SEQ ID NO: 42642 - DNA, 42 bp, Emericella nidulans
gaattcactgcggccgccatgccgttgcggagatccagttcg

SEQ ID NO: 42643 - DNA, 49 bp, Emericella nidulans
gttctcgagacgagcgatcgcgatccctacgcatggttagccgctggat

SEQ ID NO: 42644 - DNA, 47 bp, Emericella nidulans
gaattcactgcggccgccatgttcaaggggagatggcccctatacga

SEQ ID NO: 42645 - DNA, 41 bp, Emericella nidulans
gttctcgagacgagcgatcgcccgtgagcacaaccgccttc

SEQ ID NO: 42646 - DNA, 41 bp, Emericella nidulans
gaattcactgcggccgccatgagcctccctcgcgcgtctct

SEQ ID NO: 42647 - DNA, 49 bp, Emericella nidulans
gttctcgagacgagcgatcgcctcgatcttctcaggataagtcaaccca

SEQ ID NO: 42648 - DNA, 49 bp, Emericella nidulans
gaattcactgcggccgccatgttgaaatggaaaatatctcatccccaga

SEQ ID NO: 42649 - DNA, 44 bp, Emericella nidulans
gttctcgagacgagcgatcgcgcttatttgacgaccggctctcc

SEQ ID NO: 42650 - DNA, 41 bp, Emericella nidulans
gaattcactgcggccgccatgcgcttagcgagctccgcacc

SEQ ID NO: 42651 - DNA, 49 bp, Emericella nidulans
gttctcgagacgagcgatcgcgagatacccttcttgtgctggcgacggt

SEQ ID NO: 42652 - DNA, 41 bp, Emericella nidulans
gaattcactgcggccgccatgcacgcctgtcacaaatatgg

SEQ ID NO: 42653 - DNA, 41 bp, Emericella nidulans
gttctcgagacgagcgatcgcatcaaagggtgtgcggataa

SEQ ID NO: 42654 - DNA, 41 bp, Emericella nidulans
gaattcactgcggccgccatgatgataagggcagcattcgt

SEQ ID NO: 42655 - DNA, 41 bp, Emericella nidulans
gttctcgagacgagcgatcgccgccgttcttgatcaactct

SEQ ID NO: 42656 - DNA, 41 bp, Emericella nidulans
gaattcactgcggccgccatgggtcgcgcacggccctaaat

SEQ ID NO: 42657 - DNA, 49 bp, Emericella nidulans
gttctcgagacgagcgatcgcaaccccatatgccctagtccgccgatac

SEQ ID NO: 42658 - DNA, 42 bp, Emericella nidulans
gaattcactgcggccgccatgcggtcgcgaccattaccgatg

SEQ ID NO: 42659 - DNA, 49 bp, Emericella nidulans
gttctcgagacgagcgatcgcggttgatgtagaagatccatcgccaggt

SEQ ID NO: 42660 - DNA, 41 bp, Emericella nidulans
gaattcactgcggccgccatgcaccaacggcaacgcgactg

SEQ ID NO: 42661 - DNA, 41 bp, Emericella nidulans
gttctcgagacgagcgatcgcagctcccggaaacgcgacaa

SEQ ID NO: 42662 - DNA, 49 bp, Emericella nidulans
gaattcactgcggccgccatggtgttgtgcaggtataggaaggttaggg

SEQ ID NO: 42663 - DNA, 49 bp, Emericella nidulans
gttctcgagacgagcgatcgcagatgaggtgtacaatgcggatcatcta

SEQ ID NO: 42664 - DNA, 41 bp, Emericella nidulans
gaattcactgcggccgccatggccgctatcccagccagcaa

SEQ ID NO: 42665 - DNA, 44 bp, Emericella nidulans
gttctcgagacgagcgatcgcggcttcgggaatcttggaaagga

SEQ ID NO: 42666 - DNA, 46 bp, Emericella nidulans
gaattcactgcggccgccatgaacagcgcaagaagatcctcaaggt

SEQ ID NO: 42667 - DNA, 47 bp, Emericella nidulans
gttctcgagacgagcgatcgcccttaacagtcataatcccggacagg

SEQ ID NO: 42668 - DNA, 41 bp, Emericella nidulans
gaattcactgcggccgccatgccccagccccagctttccac

SEQ ID NO: 42669 - DNA, 41 bp, Emericella nidulans
gttctcgagacgagcgatcgccccatcccgctggacacgaa

SEQ ID NO: 42670 - DNA, 40 bp, Emericella nidulans
gaattcactgcggccgccatgatggcgattctcaggttcc

SEQ ID NO: 42671 - DNA, 47 bp, Emericella nidulans
gttctcgagacgagcgatcgctacgggtagcttactttcatatcttc

SEQ ID NO: 42672 - DNA, 49 bp, Emericella nidulans
gaattcactgcggccgccatggacgtagaattgaacacaatggcaggct

SEQ ID NO: 42673 - DNA, 49 bp, Emericella nidulans
gttctcgagacgagcgatcgctcttgtccttgtgggccatggcaatacc

SEQ ID NO: 42674 - DNA, 42 bp, Emericella nidulans
gaattcactgcggccgccatgcctgaccattcaccatgtctt

SEQ ID NO: 42675 - DNA, 41 bp, Emericella nidulans
gttctcgagacgagcgatcgcccatccaaaaacacccaact

SEQ ID NO: 42676 - DNA, 46 bp, Emericella nidulans
gaattcactgcggccgccatgcgtttggaggttcactctcctgtca

SEQ ID NO: 42677 - DNA, 41 bp, Emericella nidulans
gttctcgagacgagcgatcgccaccaggggtggcatcagca

SEQ ID NO: 42678 - DNA, 44 bp, Emericella nidulans
gaattcactgcggccgccatggcacgttcgcaacatgtctcctg

SEQ ID NO: 42679 - DNA, 41 bp, Emericella nidulans
gttctcgagacgagcgatcgcgcgagtggccgagtccgtct

SEQ ID NO: 42680 - DNA, 41 bp, Emericella nidulans
gaattcactgcggccgccatgcaaactactccgagcgaacc

SEQ ID NO: 42681 - DNA, 41 bp, Emericella nidulans
gttctcgagacgagcgatcgctataccccgctagtcccaga

SEQ ID NO: 42682 - DNA, 41 bp, Emericella nidulans
gaattcactgcggccgccatgccccgactccgccaaacaaa

SEQ ID NO: 42683 - DNA, 43 bp, Emericella nidulans
gttctcgagacgagcgatcgcaaaacagtccaggcgcaatccc

SEQ ID NO: 42684 - DNA, 45 bp, Emericella nidulans
gaattcactgcggccgccatgccaacgactttcaaacccataccg

SEQ ID NO: 42685 - DNA, 49 bp, Emericella nidulans
gttctcgagacgagcgatcgcaaaactcagatgaaggtagtgtcgcatc

SEQ ID NO: 42686 - DNA, 49 bp, Emericella nidulans
gaattcactgcggccgccatgttaatactcatccctgtgtcgcttagcc

SEQ ID NO: 42687 - DNA, 48 bp, Emericella nidulans
gttctcgagacgagcgatcgcagattgggaagatatgaacgggggaga

SEQ ID NO: 42688 - DNA, 49 bp, Emericella nidulans
gaattcactgcggccgccatgcatacagagattctcatagaccgcgaaa

SEQ ID NO: 42689 - DNA, 47 bp, Emericella nidulans
gttctcgagacgagcgatcgccataccccatcctctcctagtccatt

SEQ ID NO: 42690 - DNA, 42 bp, Emericella nidulans
gaattcactgcggccgccatgcacttgcgccagggcattctc

SEQ ID NO: 42691 - DNA, 41 bp, Emericella nidulans
gttctcgagacgagcgatcgcttcgcgccagcctctcaatg

SEQ ID NO: 42692 - DNA, 47 bp, Emericella nidulans
gaattcactgcggccgccatgcactctcggaaggttacgacggttgc

SEQ ID NO: 42693 - DNA, 40 bp, Emericella nidulans
gttctcgagacgagcgatcgcggagcgggtgtgggagcct

SEQ ID NO: 42694 - DNA, 41 bp, Emericella nidulans
gaattcactgcggccgccatgagccagccccaagccaggac

SEQ ID NO: 42695 - DNA, 42 bp, Emericella nidulans
gttctcgagacgagcgatcgcgcttggccatgcactgcaaca

SEQ ID NO: 42696 - DNA, 41 bp, Emericella nidulans
gaattcactgcggccgccatggattcgctcttgcactaccc

SEQ ID NO: 42697 - DNA, 46 bp, Emericella nidulans
gttctcgagacgagcgatcgcgagctaggttctcatcaaagatgtc

SEQ ID NO: 42698 - DNA, 41 bp, Emericella nidulans
gaattcactgcggccgccatgtgtccgctcaacgccacctg

SEQ ID NO: 42699 - DNA, 48 bp, Emericella nidulans
gttctcgagacgagcgatcgcccttcaaaattgagaactttctgtccc

SEQ ID NO: 42700 - DNA, 48 bp, Emericella nidulans
gaattcactgcggccgccatgtagagcccctgtaaaatcaacgacaac

SEQ ID NO: 42701 - DNA, 42 bp, Emericella nidulans
gttctcgagacgagcgatcgcaccgcctcgtccttggattgc

SEQ ID NO: 42702 - DNA, 49 bp, Emericella nidulans
gaattcactgcggccgccatgtaagataggcctttctatggttggttgg

SEQ ID NO: 42703 - DNA, 46 bp, Emericella nidulans
gttctcgagacgagcgatcgcagtgcttgggataaaggaccaggta

SEQ ID NO: 42704 - DNA, 49 bp, Emericella nidulans
gaattcactgcggccgccatggtatttatggagccggtgtcaagtttgc

SEQ ID NO: 42705 - DNA, 49 bp, Emericella nidulans
gttctcgagacgagcgatcgcatctttgatgatatcgcggagctctttg

SEQ ID NO: 42706 - DNA, 41 bp, Emericella nidulans
gaattcactgcggccgccatgctctggtgtccaatgtttcg

SEQ ID NO: 42707 - DNA, 41 bp, Emericella nidulans
gttctcgagacgagcgatcgccagcgactgtctcggatacc

SEQ ID NO: 42708 - DNA, 40 bp, Emericella nidulans
gaattcactgcggccgccatgttgttctcgccaactacga

SEQ ID NO: 42709 - DNA, 41 bp, Emericella nidulans
gttctcgagacgagcgatcgctgacgggcgtatttcagagt

SEQ ID NO: 42710 - DNA, 44 bp, Emericella nidulans
gaattcactgcggccgccatgtttctgtatcggcgtcgtgattc

SEQ ID NO: 42711 - DNA, 45 bp, Emericella nidulans
gttctcgagacgagcgatcgcgtttgaacatgggccagctggtga

SEQ ID NO: 42712 - DNA, 41 bp, Emericella nidulans
gaattcactgcggccgccatggcatggcacatggtattgac

SEQ ID NO: 42713 - DNA, 41 bp, Emericella nidulans
gttctcgagacgagcgatcgcgtcgctggcttcattttcat

SEQ ID NO: 42714 - DNA, 41 bp, Emericella nidulans
gaattcactgcggccgccatggagatcggctcactgaaacc

SEQ ID NO: 42715 - DNA, 41 bp, Emericella nidulans
gttctcgagacgagcgatcgcggcttgattcggagaaacct

SEQ ID NO: 42716 - DNA, 45 bp, Emericella nidulans
gaattcactgcggccgccatggtataatgagtagctcggaagcaa

SEQ ID NO: 42717 - DNA, 41 bp, Emericella nidulans
gttctcgagacgagcgatcgcaagcgctctccaattccttt

SEQ ID NO: 42718 - DNA, 49 bp, Emericella nidulans
gaattcactgcggccgccatgttagctgagcggtacccaattgccctgt

SEQ ID NO: 42719 - DNA, 41 bp, Emericella nidulans
gttctcgagacgagcgatcgccgtctgcgtccacggggagt

SEQ ID NO: 42720 - DNA, 41 bp, Emericella nidulans
gaattcactgcggccgccatgccatcaatctcgcgatccta

SEQ ID NO: 42721 - DNA, 41 bp, Emericella nidulans
gttctcgagacgagcgatcgccgcatcctcccctactacac

SEQ ID NO: 42722 - DNA, 47 bp, Emericella nidulans
gaattcactgcggccgccatgcataaccgccactatcaccgacaacc

SEQ ID NO: 42723 - DNA, 49 bp, Emericella nidulans
gttctcgagacgagcgatcgcggcaaactccagctctctaaattccttg

SEQ ID NO: 42724 - DNA, 49 bp, Emericella nidulans
gaattcactgcggccgccatgagtcattcagaaggaccgtatcactttg

SEQ ID NO: 42725 - DNA, 49 bp, Emericella nidulans
gttctcgagacgagcgatcgccgtacaccagccggctgctcgtacataa

SEQ ID NO: 42726 - DNA, 43 bp, Emericella nidulans
gaattcactgcggccgccatgtccgctgccaatatcgaaatgc

SEQ ID NO: 42727 - DNA, 46 bp, Emericella nidulans
gttctcgagacgagcgatcgcgatcaagacagaccttgtccgtccc

SEQ ID NO: 42728 - DNA, 41 bp, Emericella nidulans
gaattcactgcggccgccatgcatcatctgtgtcgggtcag

SEQ ID NO: 42729 - DNA, 46 bp, Emericella nidulans
gttctcgagacgagcgatcgcagtgtttcctagtactattgtcagc

SEQ ID NO: 42730 - DNA, 45 bp, Emericella nidulans
gaattcactgcggccgccatggctctcacagcccgaaaaagttgg

SEQ ID NO: 42731 - DNA, 47 bp, Emericella nidulans
gttctcgagacgagcgatcgcgataaaagcccgatgagtaggaagga

SEQ ID NO: 42732 - DNA, 42 bp, Emericella nidulans
gaattcactgcggccgccatggccacggcaagaaggctgtca

SEQ ID NO: 42733 - DNA, 44 bp, Emericella nidulans
gttctcgagacgagcgatcgccaacaccaccacgctccttctcg

SEQ ID NO: 42734 - DNA, 41 bp, Emericella nidulans
gaattcactgcggccgccatgacccctccacccggacttgg

SEQ ID NO: 42735 - DNA, 40 bp, Emericella nidulans
gttctcgagacgagcgatcgccaggcatggccgccacgta

SEQ ID NO: 42736 - DNA, 48 bp, Emericella nidulans
gaattcactgcggccgccatgcgtctcacattgacaaactgccgcaaa

SEQ ID NO: 42737 - DNA, 49 bp, Emericella nidulans
gttctcgagacgagcgatcgcaggaaagcagaatcatctatctctgtgc

SEQ ID NO: 42738 - DNA, 45 bp, Emericella nidulans
gaattcactgcggccgccatgtcgccagcgagaagaaagagaacg

SEQ ID NO: 42739 - DNA, 41 bp, Emericella nidulans
gttctcgagacgagcgatcgctcgacggtcggctgcttcct

SEQ ID NO: 42740 - DNA, 49 bp, Emericella nidulans
gaattcactgcggccgccatggctaattgttggaattgattttggcaca

SEQ ID NO: 42741 - DNA, 41 bp, Emericella nidulans
gttctcgagacgagcgatcgcagcgcagcagcttccggttc

SEQ ID NO: 42742 - DNA, 41 bp, Emericella nidulans
gaattcactgcggccgccatggcgaacaccctgaagaagag

SEQ ID NO: 42743 - DNA, 40 bp, Emericella nidulans
gttctcgagacgagcgatcgctttgtggacgtcctgttcg

SEQ ID NO: 42744 - DNA, 48 bp, Emericella nidulans
gaattcactgcggccgccatgcccctaataagcccctgggccccctat

SEQ ID NO: 42745 - DNA, 49 bp, Emericella nidulans
gttctcgagacgagcgatcgcagaggagggtaattagctgccaggcatt

SEQ ID NO: 42746 - DNA, 40 bp, Emericella nidulans
gaattcactgcggccgccatgcgcccagaacgccctgctc

SEQ ID NO: 42747 - DNA, 42 bp, Emericella nidulans
gttctcgagacgagcgatcgcctgcgtaacagcaacggcaat

SEQ ID NO: 42748 - DNA, 41 bp, Emericella nidulans
gaattcactgcggccgccatgccgcttttgagaaattcgag

SEQ ID NO: 42749 - DNA, 41 bp, Emericella nidulans
gttctcgagacgagcgatcgccgctgatatcagcttcgtca

SEQ ID NO: 42750 - DNA, 43 bp, Emericella nidulans
gaattcactgcggccgccatgtcctttcggctctggccattca

SEQ ID NO: 42751 - DNA, 41 bp, Emericella nidulans
gttctcgagacgagcgatcgcggggttccgagccccgtaag

SEQ ID NO: 42752 - DNA, 46 bp, Emericella nidulans
gaattcactgcggccgccatggtctaggtctgggtatgggctcagg

SEQ ID NO: 42753 - DNA, 41 bp, Emericella nidulans
gttctcgagacgagcgatcgccggaccgccccaagaccaat

SEQ ID NO: 42754 - DNA, 41 bp, Emericella nidulans
gaattcactgcggccgccatggcggcgggatacccataccc

SEQ ID NO: 42755 - DNA, 41 bp, Emericella nidulans
gttctcgagacgagcgatcgcggcattgcgcgatgatcctg

SEQ ID NO: 42756 - DNA, 46 bp, Emericella nidulans
gaattcactgcggccgccatgccatccaccctctattccgagaagc

SEQ ID NO: 42757 - DNA, 43 bp, Emericella nidulans
gttctcgagacgagcgatcgccgttcgtcgaggtattggagcc

SEQ ID NO: 42758 - DNA, 41 bp, Emericella nidulans
gaattcactgcggccgccatgacagggcgactgcgcctacg

SEQ ID NO: 42759 - DNA, 44 bp, Emericella nidulans
gttctcgagacgagcgatcgcttgaagtagagcagcccgccaaa

SEQ ID NO: 42760 - DNA, 41 bp, Emericella nidulans
gaattcactgcggccgccatgattgcaggcatgtacgtcaa

SEQ ID NO: 42761 - DNA, 42 bp, Emericella nidulans
gttctcgagacgagcgatcgccggatcgtgactcttgctagt

SEQ ID NO: 42762 - DNA, 44 bp, Emericella nidulans
gaattcactgcggccgccatgccaatgcagacaagcaacggagg

SEQ ID NO: 42763 - DNA, 41 bp, Emericella nidulans
gttctcgagacgagcgatcgccgctgtcgaggcggtccatc

SEQ ID NO: 42764 - DNA, 42 bp, Emericella nidulans
gaattcactgcggccgccatgctgcgctctccaaagtgctga

SEQ ID NO: 42765 - DNA, 42 bp, Emericella nidulans
gttctcgagacgagcgatcgcggtgtgctccgtttggccact

SEQ ID NO: 42766 - DNA, 45 bp, Emericella nidulans
gaattcactgcggccgccatgaaaaagtcgctccggatctcagca

SEQ ID NO: 42767 - DNA, 41 bp, Emericella nidulans
gttctcgagacgagcgatcgcgggtgacgctccgggtcaag

SEQ ID NO: 42768 - DNA, 41 bp, Emericella nidulans
gaattcactgcggccgccatgagttcggaacgaacgtcttg

SEQ ID NO: 42769 - DNA, 41 bp, Emericella nidulans
gttctcgagacgagcgatcgcgggatcgtctccagatgtgt

SEQ ID NO: 42770 - DNA, 41 bp, Emericella nidulans
gaattcactgcggccgccatgcgatgatggccgtggtgata

SEQ ID NO: 42771 - DNA, 45 bp, Emericella nidulans
gttctcgagacgagcgatcgctgtcgatcaagatgaccttggaaa

SEQ ID NO: 42772 - DNA, 49 bp, Emericella nidulans
gaattcactgcggccgccatgaatatgtcaagccgccgcctgtcaagaa

SEQ ID NO: 42773 - DNA, 42 bp, Emericella nidulans
gttctcgagacgagcgatcgctggaattgcgggttggccatt

SEQ ID NO: 42774 - DNA, 44 bp, Emericella nidulans
gaattcactgcggccgccatgctcccgtcgtccgaaatacatgc

SEQ ID NO: 42775 - DNA, 48 bp, Emericella nidulans
gttctcgagacgagcgatcgcagatttggccgcgatgagatagtcttg

SEQ ID NO: 42776 - DNA, 41 bp, Emericella nidulans
gaattcactgcggccgccatgcgcagccaccattgcctgta

SEQ ID NO: 42777 - DNA, 49 bp, Emericella nidulans
gttctcgagacgagcgatcgcccaaactgtcatagataacctccgcctc

SEQ ID NO: 42778 - DNA, 41 bp, Emericella nidulans
gaattcactgcggccgccatgagggtgcggtcgcacgaaga

SEQ ID NO: 42779 - DNA, 49 bp, Emericella nidulans
gttctcgagacgagcgatcgcgggggtttctaggaatagcacgcggtca

SEQ ID NO: 42780 - DNA, 41 bp, Emericella nidulans
gaattcactgcggccgccatgaccatagggaatgctgttgc

SEQ ID NO: 42781 - DNA, 41 bp, Emericella nidulans
gttctcgagacgagcgatcgcccgatacttgggaacgagtc

SEQ ID NO: 42782 - DNA, 49 bp, Emericella nidulans
gaattcactgcggccgccatgaaaatgcctcatccttttcattgtcagc

SEQ ID NO: 42783 - DNA, 40 bp, Emericella nidulans
gttctcgagacgagcgatcgcccctgccatggcgacttgc

SEQ ID NO: 42784 - DNA, 49 bp, Emericella nidulans
gaattcactgcggccgccatgtctttgtccggttcaattccgcatttag

SEQ ID NO: 42785 - DNA, 44 bp, Emericella nidulans
gttctcgagacgagcgatcgcgaggatacattggccaccggaga

SEQ ID NO: 42786 - DNA, 41 bp, Emericella nidulans
gaattcactgcggccgccatgcagccctaatctgcctgact

SEQ ID NO: 42787 - DNA, 41 bp, Emericella nidulans
gttctcgagacgagcgatcgccccgaggatgactctcgtta

SEQ ID NO: 42788 - DNA, 43 bp, Emericella nidulans
gaattcactgcggccgccatgccgttaatggccccgtacctcc

SEQ ID NO: 42789 - DNA, 46 bp, Emericella nidulans
gttctcgagacgagcgatcgcatgcaaacatcttgctgaatgctga

SEQ ID NO: 42790 - DNA, 49 bp, Emericella nidulans
gaattcactgcggccgccatgcttccattttcttctcaagcaacacttc

SEQ ID NO: 42791 - DNA, 44 bp, Emericella nidulans
gttctcgagacgagcgatcgcagatctcagcctggagagccaga

SEQ ID NO: 42792 - DNA, 41 bp, Emericella nidulans
gaattcactgcggccgccatggagcagtgcccgctactatc

SEQ ID NO: 42793 - DNA, 41 bp, Emericella nidulans
gttctcgagacgagcgatcgcgaggtatgcatcgagggtgt

SEQ ID NO: 42794 - DNA, 40 bp, Emericella nidulans
gaattcactgcggccgccatggcccagctgcactctactg

SEQ ID NO: 42795 - DNA, 41 bp, Emericella nidulans
gttctcgagacgagcgatcgccagcatgcattgtgagatcc

SEQ ID NO: 42796 - DNA, 44 bp, Emericella nidulans
gaattcactgcggccgccatgcgacattttggttactatgaaaa

SEQ ID NO: 42797 - DNA, 41 bp, Emericella nidulans
gttctcgagacgagcgatcgcggccacggtaagactgaaga

SEQ ID NO: 42798 - DNA, 42 bp, Emericella nidulans
gaattcactgcggccgccatgctcgaaggacaagcgcgatgc

SEQ ID NO: 42799 - DNA, 43 bp, Emericella nidulans
gttctcgagacgagcgatcgcggtgggatgaaaccctcgcaga

SEQ ID NO: 42800 - DNA, 49 bp, Emericella nidulans
gaattcactgcggccgccatgccgaaaatggtacaactggtactctcca

SEQ ID NO: 42801 - DNA, 43 bp, Emericella nidulans
gttctcgagacgagcgatcgcgacccatgtagaatgcgccacc

SEQ ID NO: 42802 - DNA, 49 bp, Emericella nidulans
gaattcactgcggccgccatgaaaccactacgcgatttgtctactgatg

SEQ ID NO: 42803 - DNA, 41 bp, Emericella nidulans
gttctcgagacgagcgatcgcttgccagtcgctcggtcagt

SEQ ID NO: 42804 - DNA, 41 bp, Emericella nidulans
gaattcactgcggccgccatgttgtcttgtcggcccgctcc

SEQ ID NO: 42805 - DNA, 43 bp, Emericella nidulans
gttctcgagacgagcgatcgcctgaaattcccatgcggcgtgt

SEQ ID NO: 42806 - DNA, 45 bp, Emericella nidulans
gaattcactgcggccgccatgccggtcaactggagaattccatgc

SEQ ID NO: 42807 - DNA, 49 bp, Emericella nidulans
gttctcgagacgagcgatcgcgggataacgaagcaatgtagttaaagca

SEQ ID NO: 42808 - DNA, 41 bp, Emericella nidulans
gaattcactgcggccgccatgagaagccgcgcgcggtaaac

SEQ ID NO: 42809 - DNA, 40 bp, Emericella nidulans
gttctcgagacgagcgatcgctgccgcgtctccagggtcc

SEQ ID NO: 42810 - DNA, 46 bp, Emericella nidulans
gaattcactgcggccgccatgcccacggtgtcttcttagcaaattc

SEQ ID NO: 42811 - DNA, 47 bp, Emericella nidulans
gttctcgagacgagcgatcgcccaatagtcttgaatggctggatgga

SEQ ID NO: 42812 - DNA, 45 bp, Emericella nidulans
gaattcactgcggccgccatggatctcaaccgaacagcgctgcaa

SEQ ID NO: 42813 - DNA, 42 bp, Emericella nidulans
gttctcgagacgagcgatcgcgggctcgagtcgttcaggttc

SEQ ID NO: 42814 - DNA, 42 bp, Emericella nidulans
gaattcactgcggccgccatgtgcatgcttactattgcagtt

SEQ ID NO: 42815 - DNA, 41 bp, Emericella nidulans
gttctcgagacgagcgatcgcaatccgtacgcggttttctt

SEQ ID NO: 42816 - DNA, 41 bp, Emericella nidulans
gaattcactgcggccgccatgaaagcagcccattctcacag

SEQ ID NO: 42817 - DNA, 45 bp, Emericella nidulans
gttctcgagacgagcgatcgcccaagcttataacattgactacga

SEQ ID NO: 42818 - DNA, 41 bp, Emericella nidulans
gaattcactgcggccgccatggcccgagtctcgggtgctga

SEQ ID NO: 42819 - DNA, 49 bp, Emericella nidulans
gttctcgagacgagcgatcgccacgaaacagcttgttgttgaagtacag

SEQ ID NO: 42820 - DNA, 41 bp, Emericella nidulans
gaattcactgcggccgccatgggcagcccgggtgatacgtc

SEQ ID NO: 42821 - DNA, 48 bp, Emericella nidulans
gttctcgagacgagcgatcgcggtggtcgatgtaaagagcgtcggaga

SEQ ID NO: 42822 - DNA, 45 bp, Emericella nidulans
gaattcactgcggccgccatgtccagtacggaaagtgcaggagcc

SEQ ID NO: 42823 - DNA, 48 bp, Emericella nidulans
gttctcgagacgagcgatcgctcctccgtatcttcatcctcttcatcc

SEQ ID NO: 42824 - DNA, 49 bp, Emericella nidulans
gaattcactgcggccgccatgcttaagaaacaaaatgtctttcccccac

SEQ ID NO: 42825 - DNA, 49 bp, Emericella nidulans
gttctcgagacgagcgatcgctcagcaattgtttctgagtcaatatcca

SEQ ID NO: 42826 - DNA, 41 bp, Emericella nidulans
gaattcactgcggccgccatggggctcggccctctgtcaag

SEQ ID NO: 42827 - DNA, 41 bp, Emericella nidulans
gttctcgagacgagcgatcgcgggcatcaaggccggaggtc

SEQ ID NO: 42828 - DNA, 42 bp, Emericella nidulans
gaattcactgcggccgccatgggcgccctgcaaagtctgaca

SEQ ID NO: 42829 - DNA, 44 bp, Emericella nidulans
gttctcgagacgagcgatcgcgcggatagtcaatgctcgccaga

SEQ ID NO: 42830 - DNA, 46 bp, Emericella nidulans
gaattcactgcggccgccatgcgatctcagtcgagatgggggcagt

SEQ ID NO: 42831 - DNA, 43 bp, Emericella nidulans
gttctcgagacgagcgatcgccttgcagccctatgccctcgac

SEQ ID NO: 42832 - DNA, 42 bp, Emericella nidulans
gaattcactgcggccgccatggtgtgcaagcgtccacgtcca

SEQ ID NO: 42833 - DNA, 41 bp, Emericella nidulans
gttctcgagacgagcgatcgcccgttgcttccggcttcagg

SEQ ID NO: 42834 - DNA, 44 bp, Emericella nidulans
gaattcactgcggccgccatgtcacacacttctcctgccagacg

SEQ ID NO: 42835 - DNA, 49 bp, Emericella nidulans
gttctcgagacgagcgatcgcattcaaaggagattgaagttggagtgtg

SEQ ID NO: 42836 - DNA, 41 bp, Emericella nidulans
gaattcactgcggccgccatggaagtaccgcggtatgcagt

SEQ ID NO: 42837 - DNA, 41 bp, Emericella nidulans
gttctcgagacgagcgatcgctcgccgatggtaggatactc

SEQ ID NO: 42838 - DNA, 41 bp, Emericella nidulans
gaattcactgcggccgccatggactcggcgcgtcgaatcct

SEQ ID NO: 42839 - DNA, 47 bp, Emericella nidulans
gttctcgagacgagcgatcgccgcaaacatctgcacgtacgtagacc

SEQ ID NO: 42840 - DNA, 44 bp, Emericella nidulans
gaattcactgcggccgccatggcctctaacctcccattcacctg

SEQ ID NO: 42841 - DNA, 41 bp, Emericella nidulans
gttctcgagacgagcgatcgcctcggcggcgcaatctcaat

SEQ ID NO: 42842 - DNA, 45 bp, Emericella nidulans
gaattcactgcggccgccatggcatttgagtggaagcttggttgc

SEQ ID NO: 42843 - DNA, 45 bp, Emericella nidulans
gttctcgagacgagcgatcgcgcctaggtgattgtccaggccgta

SEQ ID NO: 42844 - DNA, 41 bp, Emericella nidulans
gaattcactgcggccgccatgccccggtcctcaagcgacaa

SEQ ID NO: 42845 - DNA, 41 bp, Emericella nidulans
gttctcgagacgagcgatcgcgaagcctcgggctccggtgt

SEQ ID NO: 42846 - DNA, 41 bp, Emericella nidulans
gaattcactgcggccgccatgatgccggatggcgaaagtcg

SEQ ID NO: 42847 - DNA, 41 bp, Emericella nidulans
gttctcgagacgagcgatcgcgacggcgccgacctcgtttt

SEQ ID NO: 42848 - DNA, 41 bp, Emericella nidulans
gaattcactgcggccgccatgacaggccttcctttctcaat

SEQ ID NO: 42849 - DNA, 41 bp, Emericella nidulans
gttctcgagacgagcgatcgcctgcagtaggggtggtcttg

SEQ ID NO: 42850 - DNA, 41 bp, Emericella nidulans
gaattcactgcggccgccatgccgacatttcgtcaggtttc

SEQ ID NO: 42851 - DNA, 41 bp, Emericella nidulans
gttctcgagacgagcgatcgctctcatcccgagtgatttcc

SEQ ID NO: 42852 - DNA, 41 bp, Emericella nidulans
gaattcactgcggccgccatgtccgtaagcccgaccaacca

SEQ ID NO: 42853 - DNA, 44 bp, Emericella nidulans
gttctcgagacgagcgatcgccccagttcgccacagttcagtaa

SEQ ID NO: 42854 - DNA, 44 bp, Emericella nidulans
gaattcactgcggccgccatggctgctgtcaatcgagctctctg

SEQ ID NO: 42855 - DNA, 41 bp, Emericella nidulans
gttctcgagacgagcgatcgccgcgccgagacgcttcacat

SEQ ID NO: 42856 - DNA, 41 bp, Emericella nidulans
gaattcactgcggccgccatgtataaccgcgcacacgagta

SEQ ID NO: 42857 - DNA, 41 bp, Emericella nidulans
gttctcgagacgagcgatcgcccccctccttagcaactgtc

SEQ ID NO: 42858 - DNA, 45 bp, Emericella nidulans
gaattcactgcggccgccatgccgggggaagaatctttacaatgg

SEQ ID NO: 42859 - DNA, 48 bp, Emericella nidulans
gttctcgagacgagcgatcgcagcttaaagaaaggagtgagaggcaga

SEQ ID NO: 42860 - DNA, 49 bp, Emericella nidulans
gaattcactgcggccgccatgtttatttctgtgggaattctctcggtct

SEQ ID NO: 42861 - DNA, 48 bp, Emericella nidulans
gttctcgagacgagcgatcgctccagtgtagtactggatccccggaag

SEQ ID NO: 42862 - DNA, 49 bp, Emericella nidulans
gaattcactgcggccgccatgggtgtcattcattccattcattatcaca

SEQ ID NO: 42863 - DNA, 49 bp, Emericella nidulans
gttctcgagacgagcgatcgcgagttggtcatgatgctggtagaaaagt

SEQ ID NO: 42864 - DNA, 41 bp, Emericella nidulans
gaattcactgcggccgccatgggttgattcgaggaccaaaa

SEQ ID NO: 42865 - DNA, 46 bp, Emericella nidulans
gttctcgagacgagcgatcgcttagttcattctcaaaaagcaaaga

SEQ ID NO: 42866 - DNA, 49 bp, Emericella nidulans
gaattcactgcggccgccatgtttgaagtcagctacaaagctggatacc

SEQ ID NO: 42867 - DNA, 49 bp, Emericella nidulans
gttctcgagacgagcgatcgctataaaacgcagctacctgatccccaac

SEQ ID NO: 42868 - DNA, 41 bp, Emericella nidulans
gaattcactgcggccgccatggcccgcatcctcaggcacat

SEQ ID NO: 42869 - DNA, 46 bp, Emericella nidulans
gttctcgagacgagcgatcgcaattccaattccttgatccccgtga

SEQ ID NO: 42870 - DNA, 46 bp, Emericella nidulans
gaattcactgcggccgccatgggaaggtggagcgaaagttcactaa

SEQ ID NO: 42871 - DNA, 42 bp, Emericella nidulans
gttctcgagacgagcgatcgctgcggcattggtactcaccca

SEQ ID NO: 42872 - DNA, 40 bp, Emericella nidulans
gaattcactgcggccgccatgcgtgccatccgcaacttcc

SEQ ID NO: 42873 - DNA, 49 bp, Emericella nidulans
gttctcgagacgagcgatcgcaatacgatactgggttatgacgctgagg

SEQ ID NO: 42874 - DNA, 49 bp, Emericella nidulans
gaattcactgcggccgccatgtgaagaagtttcaggagaaacaggcaaa

SEQ ID NO: 42875 - DNA, 45 bp, Emericella nidulans
gttctcgagacgagcgatcgcttgccatggtactcgtgtttccaa

SEQ ID NO: 42876 - DNA, 41 bp, Emericella nidulans
gaattcactgcggccgccatgggcaacggggctcatcagga

SEQ ID NO: 42877 - DNA, 49 bp, Emericella nidulans
gttctcgagacgagcgatcgcacctaacttcctcctaatcgacatttgc

SEQ ID NO: 42878 - DNA, 41 bp, Emericella nidulans
gaattcactgcggccgccatgatgccggcattgccagtgtg

SEQ ID NO: 42879 - DNA, 49 bp, Emericella nidulans
gttctcgagacgagcgatcgcgatctggcaaatcaccaatataatacgg

SEQ ID NO: 42880 - DNA, 48 bp, Emericella nidulans
gaattcactgcggccgccatgcctttctgcagtggagagacggccaaa

SEQ ID NO: 42881 - DNA, 41 bp, Emericella nidulans
gttctcgagacgagcgatcgccccggtttggggcttttgct

SEQ ID NO: 42882 - DNA, 46 bp, Emericella nidulans
gaattcactgcggccgccatgaccatgccatattccacccaaactg

SEQ ID NO: 42883 - DNA, 48 bp, Emericella nidulans
gttctcgagacgagcgatcgctgccgtcttctcgtcttactgattacg

SEQ ID NO: 42884 - DNA, 49 bp, Emericella nidulans
gaattcactgcggccgccatgatgacaaaagcgcgtactacctagtcat

SEQ ID NO: 42885 - DNA, 46 bp, Emericella nidulans
gttctcgagacgagcgatcgcctgcctctcactcagatcaacaaca

SEQ ID NO: 42886 - DNA, 42 bp, Emericella nidulans
gaattcactgcggccgccatgatgatgtccgccgccggttac

SEQ ID NO: 42887 - DNA, 49 bp, Emericella nidulans
gttctcgagacgagcgatcgctaatcccgacatacattgcaaaactttc

SEQ ID NO: 42888 - DNA, 41 bp, Emericella nidulans
gaattcactgcggccgccatgccgcaagcgcctggactttc

SEQ ID NO: 42889 - DNA, 44 bp, Emericella nidulans
gttctcgagacgagcgatcgccgtgggatctagcagcgtctcca

SEQ ID NO: 42890 - DNA, 43 bp, Emericella nidulans
gaattcactgcggccgccatggacatcctcttaccttcctggt

SEQ ID NO: 42891 - DNA, 41 bp, Emericella nidulans
gttctcgagacgagcgatcgccgattaagcgcctcatctgt

SEQ ID NO: 42892 - DNA, 48 bp, Emericella nidulans
gaattcactgcggccgccatggagatatgggttgtctcacggaggatg

SEQ ID NO: 42893 - DNA, 47 bp, Emericella nidulans
gttctcgagacgagcgatcgcgcttgatgatcttcctttcggcgact

SEQ ID NO: 42894 - DNA, 42 bp, Emericella nidulans
gaattcactgcggccgccatgaaccccggtcagacgattgaa

SEQ ID NO: 42895 - DNA, 43 bp, Emericella nidulans
gttctcgagacgagcgatcgctgcgtagccctctgcagctttg

SEQ ID NO: 42896 - DNA, 41 bp, Emericella nidulans
gaattcactgcggccgccatgccgccatttgcgctgattcc

SEQ ID NO: 42897 - DNA, 44 bp, Emericella nidulans
gttctcgagacgagcgatcgccgaccgttggacgactgagactg

SEQ ID NO: 42898 - DNA, 40 bp, Emericella nidulans
gaattcactgcggccgccatgcattccaggttgatgccac

SEQ ID NO: 42899 - DNA, 41 bp, Emericella nidulans
gttctcgagacgagcgatcgcgttgttgcttacacggaacg

SEQ ID NO: 42900 - DNA, 43 bp, Emericella nidulans
gaattcactgcggccgccatgtctgacgctcagaagcctgttg

SEQ ID NO: 42901 - DNA, 39 bp, Emericella nidulans
gttctcgagacgagcgatcgctcaagcagcggcctggac

SEQ ID NO: 42902 - DNA, 40 bp, Emericella nidulans
gaattcactgcggccgccatgttccgccaagtcagttcag

SEQ ID NO: 42903 - DNA, 42 bp, Emericella nidulans
gttctcgagacgagcgatcgcctagaccttctggacaacagc

SEQ ID NO: 42904 - DNA, 44 bp, Emericella nidulans
gaattcactgcggccgccatgacccgggggaccgtggattcttt

SEQ ID NO: 42905 - DNA, 51 bp, Emericella nidulans
gttctcgagacgagcgatcgcttagttaggcttggtcagcttaatgggagg

SEQ ID NO: 42906 - DNA, 48 bp, Emericella nidulans
gaattcactgcggccgccatgaagctttccgtcctatccgttctcctg

SEQ ID NO: 42907 - DNA, 50 bp, Emericella nidulans
gttctcgagacgagcgatcgcctaaacaacccagtcctggctcctcttgc

SEQ ID NO: 42908 - DNA, 47 bp, Emericella nidulans
gaattcactgcggccgccatggcagtcaccaacggtctgactttctg

SEQ ID NO: 42909 - DNA, 52 bp, Emericella nidulans
gttctcgagacgagcgatcgcttaagcagcaagctcacggatcttagcctca

SEQ ID NO: 42910 - DNA, 47 bp, Emericella nidulans
gaattcactgcggccgccatgcatttctgtggtcctgaccagcttca

SEQ ID NO: 42911 - DNA, 48 bp, Emericella nidulans
gttctcgagacgagcgatcgcttaaaccttcacgccctgagcctgagc

SEQ ID NO: 42912 - DNA, 45 bp, Emericella nidulans
gaattcactgcggccgccatggtctgggaaactgccgatggtgag

SEQ ID NO: 42913 - DNA, 49 bp, Emericella nidulans
gttctcgagacgagcgatcgcttagaggtgtgctgtacgctctttcgtg

SEQ ID NO: 42914 - DNA, 47 bp, Emericella nidulans
gaattcactgcggccgccatggtgattgagctatgggctgacattgg

SEQ ID NO: 42915 - DNA, 51 bp, Emericella nidulans
gttctcgagacgagcgatcgctcattttgcaacaatcttctcgctcggtgt

SEQ ID NO: 42916 - DNA, 41 bp, Emericella nidulans
gaattcactgcggccgccatgcctccccgaaagcagtggat

SEQ ID NO: 42917 - DNA, 41 bp, Emericella nidulans
gttctcgagacgagcgatcgctcaaaccttgccagacaccc

SEQ ID NO: 42918 - DNA, 43 bp, Emericella nidulans
gaattcactgcggccgccatgcatgctatttttctccttctcg

SEQ ID NO: 42919 - DNA, 40 bp, Emericella nidulans
gttctcgagacgagcgatcgctcataggccgaagcagttg

SEQ ID NO: 42920 - DNA, 44 bp, Emericella nidulans
gaattcactgcggccgccatgtatgccgtccgccggttatgtgt

SEQ ID NO: 42921 - DNA, 49 bp, Emericella nidulans
gttctcgagacgagcgatcgcttagttgctgaagaaatgagcccgaatg

SEQ ID NO: 42922 - DNA, 43 bp, Emericella nidulans
gaattcactgcggccgccatggtcaacttcactatcgaggagc

SEQ ID NO: 42923 - DNA, 39 bp, Emericella nidulans
gttctcgagacgagcgatcgctcaacctcgggctggtct

SEQ ID NO: 42924 - DNA, 46 bp, Emericella nidulans
gaattcactgcggccgccatggctttggctgatgtggttgttgaga

SEQ ID NO: 42925 - DNA, 49 bp, Emericella nidulans
gttctcgagacgagcgatcgcctaattcccggtagcaatgctatgcctc

SEQ ID NO: 42926 - DNA, 46 bp, Emericella nidulans
gaattcactgcggccgccatggccaaacaaggtggctatcggcttg

SEQ ID NO: 42927 - DNA, 45 bp, Emericella nidulans
gttctcgagacgagcgatcgctcagcaatctcccgacagcagcat

SEQ ID NO: 42928 - DNA, 41 bp, Emericella nidulans
gaattcactgcggccgccatggaggaccgcctcgtcgacac

SEQ ID NO: 42929 - DNA, 46 bp, Emericella nidulans
gttctcgagacgagcgatcgcttagacaggcagaggtaaggtgctg

SEQ ID NO: 42930 - DNA, 45 bp, Emericella nidulans
gaattcactgcggccgccatgatgaaccaccatggtggagggagt

SEQ ID NO: 42931 - DNA, 56 bp, Emericella nidulans
gttctcgagacgagcgatcgcctagtgctgctctttcataaacttcacaaaagcct

SEQ ID NO: 42932 - DNA, 43 bp, Emericella nidulans
gaattcactgcggccgccatgaagctcctcctctccactcttt

SEQ ID NO: 42933 - DNA, 40 bp, Emericella nidulans
gttctcgagacgagcgatcgcttacagggcagcaacaacg

SEQ ID NO: 42934 - DNA, 42 bp, Emericella nidulans
gaattcactgcggccgccatgaacgaaaccctactccaagat

SEQ ID NO: 42935 - DNA, 41 bp, Emericella nidulans
gttctcgagacgagcgatcgcttacctgttaccccttctgc

SEQ ID NO: 42936 - DNA, 47 bp, Emericella nidulans
gaattcactgcggccgccatggataaggtgctcgtcatcgactctgg

SEQ ID NO: 42937 - DNA, 44 bp, Emericella nidulans
gttctcgagacgagcgatcgctcaagagcctcggcggatcgtag

SEQ ID NO: 42938 - DNA, 42 bp, Emericella nidulans
gaattcactgcggccgccatggttgacgaactgcaacaaaaa

SEQ ID NO: 42939 - DNA, 42 bp, Emericella nidulans
gttctcgagacgagcgatcgctcacagttcgtcctccaagta

SEQ ID NO: 42940 - DNA, 49 bp, Emericella nidulans
gaattcactgcggccgccatggcgaatcgtatctcacgcatgtttacgg

SEQ ID NO: 42941 - DNA, 45 bp, Emericella nidulans
gttctcgagacgagcgatcgcttagaagccttcctcacccgcttg

SEQ ID NO: 42942 - DNA, 48 bp, Emericella nidulans
gaattcactgcggccgccatgatgttcaccaaggctctcgttgctgct

SEQ ID NO: 42943 - DNA, 43 bp, Emericella nidulans
gttctcgagacgagcgatcgctcaatgggcacccgtggtagcg

SEQ ID NO: 42944 - DNA, 50 bp, Emericella nidulans
gaattcactgcggccgccatgatcttctaccgtaagggcatccgcaggac

SEQ ID NO: 42945 - DNA, 48 bp, Emericella nidulans
gttctcgagacgagcgatcgcctactccttcgcccacggaagattaaa

SEQ ID NO: 42946 - DNA, 47 bp, Emericella nidulans
gaattcactgcggccgccatggcgggcaaatacgaagatcattaccc

SEQ ID NO: 42947 - DNA, 45 bp, Emericella nidulans
gttctcgagacgagcgatcgcctacggcctcgccagctcctgttt

SEQ ID NO: 42948 - DNA, 47 bp, Emericella nidulans
gaattcactgcggccgccatgcatctccccaacattctccttgcctc

SEQ ID NO: 42949 - DNA, 52 bp, Emericella nidulans
gttctcgagacgagcgatcgcttacaagttcacaccgtcaaggataccctca

SEQ ID NO: 42950 - DNA, 45 bp, Emericella nidulans
gaattcactgcggccgccatgtctgcccaaaccagcaacgaccac

SEQ ID NO: 42951 - DNA, 46 bp, Emericella nidulans
gttctcgagacgagcgatcgcctagtcgctctcgctcgctgtcatc

SEQ ID NO: 42952 - DNA, 48 bp, Emericella nidulans
gaattcactgcggccgccatgccgcacactaatctcatcttccgcacc

SEQ ID NO: 42953 - DNA, 47 bp, Emericella nidulans
gttctcgagacgagcgatcgctcagtcgaggataatggctgctaccg

SEQ ID NO: 42954 - DNA, 43 bp, Emericella nidulans
gaattcactgcggccgccatgtcttcccgccaggtcacctttg

SEQ ID NO: 42955 - DNA, 48 bp, Emericella nidulans
gttctcgagacgagcgatcgctcacgacaacaagggtggctcttccac

SEQ ID NO: 42956 - DNA, 40 bp, Emericella nidulans
gaattcactgcggccgccatgccaaagggcatgcacaacc

SEQ ID NO: 42957 - DNA, 41 bp, Emericella nidulans
gttctcgagacgagcgatcgctcaccgccgaattggaaaag

SEQ ID NO: 42958 - DNA, 46 bp, Emericella nidulans
gaattcactgcggccgccatgacgacccgaacgacagttcctaatg

SEQ ID NO: 42959 - DNA, 51 bp, Emericella nidulans
gttctcgagacgagcgatcgcctatttgtatttggccatgaactcggaatg

SEQ ID NO: 42960 - DNA, 39 bp, Emericella nidulans
gaattcactgcggccgccatgtcacacgcgcagttgata

SEQ ID NO: 42961 - DNA, 43 bp, Emericella nidulans
gttctcgagacgagcgatcgcttatcttctcacaccggcaaac

SEQ ID NO: 42962 - DNA, 44 bp, Emericella nidulans
gaattcactgcggccgccatgtctcgtgtgccgtactatctccc

SEQ ID NO: 42963 - DNA, 45 bp, Emericella nidulans
gttctcgagacgagcgatcgcttaatccactcggtccaatttttg

SEQ ID NO: 42964 - DNA, 44 bp, Emericella nidulans
gaattcactgcggccgccatgcattccaactacccctccgattc

SEQ ID NO: 42965 - DNA, 45 bp, Emericella nidulans
gttctcgagacgagcgatcgcttaagcggtggtaagcttgttctg

SEQ ID NO: 42966 - DNA, 45 bp, Emericella nidulans
gaattcactgcggccgccatggactccgaagattcgacgtatttg

SEQ ID NO: 42967 - DNA, 45 bp, Emericella nidulans
gttctcgagacgagcgatcgctcacctctgatcctggtgactagc

SEQ ID NO: 42968 - DNA, 45 bp, Emericella nidulans
gaattcactgcggccgccatggcttgccccagcacttcaaaggac

SEQ ID NO: 42969 - DNA, 51 bp, Emericella nidulans
gttctcgagacgagcgatcgctcattccagcttcaggatgcctgcaaatac

SEQ ID NO: 42970 - DNA, 55 bp, Emericella nidulans
gaattcactgcggccgccatgatatttaagctaagaatcttcaggtcgttactgg

SEQ ID NO: 42971 - DNA, 46 bp, Emericella nidulans
gttctcgagacgagcgatcgctcaagtagcttgcaccttccccttc

SEQ ID NO: 42972 - DNA, 44 bp, Emericella nidulans
gaattcactgcggccgccatggtccagatcgacactagcctacg

SEQ ID NO: 42973 - DNA, 45 bp, Emericella nidulans
gttctcgagacgagcgatcgctcaagaggtgaggttagggcattc

SEQ ID NO: 42974 - DNA, 41 bp, Emericella nidulans
gaattcactgcggccgccatggcgaacccggtcaccgaaat

SEQ ID NO: 42975 - DNA, 49 bp, Emericella nidulans
gttctcgagacgagcgatcgctcaatccatgtacttgcacagcggcaac

SEQ ID NO: 42976 - DNA, 48 bp, Emericella nidulans
gaattcactgcggccgccatggagaggaagcgtattgtggtcaaggac

SEQ ID NO: 42977 - DNA, 49 bp, Emericella nidulans
gttctcgagacgagcgatcgctcaagtctctgtaggcttctgctccacc

SEQ ID NO: 42978 - DNA, 48 bp, Emericella nidulans
gaattcactgcggccgccatggatagtccgcttgcttccccagccaag

SEQ ID NO: 42979 - DNA, 52 bp, Emericella nidulans
gttctcgagacgagcgatcgcttaacgtctgtccgacaagttctcgaatatc

SEQ ID NO: 42980 - DNA, 41 bp, Emericella nidulans
gaattcactgcggccgccatgaagtggaatgcctctactgc

SEQ ID NO: 42981 - DNA, 45 bp, Emericella nidulans
gttctcgagacgagcgatcgcctattcaatgccccaatatttttc

SEQ ID NO: 42982 - DNA, 40 bp, Emericella nidulans
gaattcactgcggccgccatggcccatctgggaggaatcg

SEQ ID NO: 42983 - DNA, 53 bp, Emericella nidulans
gttctcgagacgagcgatcgcttatatctttcctgacctctttctcagatacg

SEQ ID NO: 42984 - DNA, 43 bp, Emericella nidulans
gaattcactgcggccgccatgccacctctgcccttcaacgaat

SEQ ID NO: 42985 - DNA, 43 bp, Emericella nidulans
gttctcgagacgagcgatcgcttagtggatgttgaccgcaaaa

SEQ ID NO: 42986 - DNA, 41 bp, Emericella nidulans
gaattcactgcggccgccatgacgtcatccgcgacggcatt

SEQ ID NO: 42987 - DNA, 49 bp, Emericella nidulans
gttctcgagacgagcgatcgcttactccctaacccagacggcagccata

SEQ ID NO: 42988 - DNA, 49 bp, Emericella nidulans
gaattcactgcggccgccatgactttatctcttcattgtcccgccttcc

SEQ ID NO: 42989 - DNA, 54 bp, Emericella nidulans
gttctcgagacgagcgatcgcctatttttcttgaacggagttctgtgtggaatc

SEQ ID NO: 42990 - DNA, 49 bp, Emericella nidulans
gaattcactgcggccgccatgatgcgcggtggtactatccgctcgatta

SEQ ID NO: 42991 - DNA, 55 bp, Emericella nidulans
gttctcgagacgagcgatcgcctagtagtagaaagtctcgtcaacagtgcgaccc

SEQ ID NO: 42992 - DNA, 41 bp, Emericella nidulans
gaattcactgcggccgccatgtgccccgcgaaacccttctc

SEQ ID NO: 42993 - DNA, 49 bp, Emericella nidulans
gttctcgagacgagcgatcgctcaaccatccagtctaatgagcccttca

SEQ ID NO: 42994 - DNA, 41 bp, Emericella nidulans
gaattcactgcggccgccatgactttccagccaggctcttc

SEQ ID NO: 42995 - DNA, 46 bp, Emericella nidulans
gttctcgagacgagcgatcgcctaagctagttttaccctcgtaggc

SEQ ID NO: 42996 - DNA, 47 bp, Emericella nidulans
gaattcactgcggccgccatgcccaagaacaagggaaagggcggtaa

SEQ ID NO: 42997 - DNA, 53 bp, Emericella nidulans
gttctcgagacgagcgatcgcttatagttcgtcgatatcgacctccttctcgt

SEQ ID NO: 42998 - DNA, 50 bp, Emericella nidulans
gaattcactgcggccgccatggacgtcaaccctcttactctcggtattga

SEQ ID NO: 42999 - DNA, 49 bp, Emericella nidulans
gttctcgagacgagcgatcgcttacaattcatcatggccatactcgtca

SEQ ID NO: 43000 - DNA, 42 bp, Emericella nidulans
gaattcactgcggccgccatgtttggtggcggtggggatgag

SEQ ID NO: 43001 - DNA, 49 bp, Emericella nidulans
gttctcgagacgagcgatcgctcagtagtagtcgtcatcggcaaactcg

SEQ ID NO: 43002 - DNA, 42 bp, Emericella nidulans
gaattcactgcggccgccatggacgagatcgccgccgcaaag

SEQ ID NO: 43003 - DNA, 55 bp, Emericella nidulans
gttctcgagacgagcgatcgcttagtaggagacagaatcaaattgcttaggatgg

SEQ ID NO: 43004 - DNA, 52 bp, Emericella nidulans
gaattcactgcggccgccatgtctctcttcagaactatcccgacccctggag

SEQ ID NO: 43005 - DNA, 51 bp, Emericella nidulans
gttctcgagacgagcgatcgcttactgaatggtgatcttctttgcagaggg

SEQ ID NO: 43006 - DNA, 43 bp, Emericella nidulans
gaattcactgcggccgccatgcgtttctccgctgctgctgttg

SEQ ID NO: 43007 - DNA, 45 bp, Emericella nidulans
gttctcgagacgagcgatcgcttacgtagcagtgccgctggggac

SEQ ID NO: 43008 - DNA, 44 bp, Emericella nidulans
gaattcactgcggccgccatgttgagtgccgagtacgccaacac

SEQ ID NO: 43009 - DNA, 48 bp, Emericella nidulans
gttctcgagacgagcgatcgcttacaatttgatccatctccccatcca

SEQ ID NO: 43010 - DNA, 50 bp, Emericella nidulans
gaattcactgcggccgccatggagtttaacacctccaaggaggtcaccgt

SEQ ID NO: 43011 - DNA, 52 bp, Emericella nidulans
gttctcgagacgagcgatcgcttaagagaggaggtcggcaactgtatgtttg

SEQ ID NO: 43012 - DNA, 44 bp, Emericella nidulans
gaattcactgcggccgccatgcctaaaaacgattcaaagaccgt

SEQ ID NO: 43013 - DNA, 39 bp, Emericella nidulans
gttctcgagacgagcgatcgcttactcgtcatcgccacc

SEQ ID NO: 43014 - DNA, 46 bp, Emericella nidulans
gaattcactgcggccgccatgcgaatctataaaccggcatctctga

SEQ ID NO: 43015 - DNA, 47 bp, Emericella nidulans
gttctcgagacgagcgatcgcctacagaccaagcttaacgctcataa

SEQ ID NO: 43016 - DNA, 48 bp, Emericella nidulans
gaattcactgcggccgccatgggtgaccacctctggatctctcgtttc

SEQ ID NO: 43017 - DNA, 49 bp, Emericella nidulans
gttctcgagacgagcgatcgcttacagaccaccgcagagagtttcagca

SEQ ID NO: 43018 - DNA, 42 bp, Emericella nidulans
gaattcactgcggccgccatgagacccctagcacacacctct

SEQ ID NO: 43019 - DNA, 44 bp, Emericella nidulans
gttctcgagacgagcgatcgcctagtacccctcctggttcacta

SEQ ID NO: 43020 - DNA, 50 bp, Emericella nidulans
gaattcactgcggccgccatgactgtctcactggacactcccagagaaaa

SEQ ID NO: 43021 - DNA, 52 bp, Emericella nidulans
gttctcgagacgagcgatcgcctaaacactcattttcatcttgatcgccttg

SEQ ID NO: 43022 - DNA, 44 bp, Emericella nidulans
gaattcactgcggccgccatgagcacaattcagagcctgaaaaa

SEQ ID NO: 43023 - DNA, 45 bp, Emericella nidulans
gttctcgagacgagcgatcgcttacatggcaggctgctcttgatg

SEQ ID NO: 43024 - DNA, 43 bp, Emericella nidulans
gaattcactgcggccgccatgattgccgcttctactgcccaga

SEQ ID NO: 43025 - DNA, 44 bp, Emericella nidulans
gttctcgagacgagcgatcgcctatgcggtttgagggttgaatc

SEQ ID NO: 43026 - DNA, 40 bp, Emericella nidulans
gaattcactgcggccgccatggcctcaacgggtcttgaaa

SEQ ID NO: 43027 - DNA, 41 bp, Emericella nidulans
gttctcgagacgagcgatcgcctacttccaccacccactcg

SEQ ID NO: 43028 - DNA, 42 bp, Emericella nidulans
gaattcactgcggccgccatgccgagctccactgcgcaatcc

SEQ ID NO: 43029 - DNA, 46 bp, Emericella nidulans
gttctcgagacgagcgatcgcctaaccaagcggagtgcggatcgtc

SEQ ID NO: 43030 - DNA, 45 bp, Emericella nidulans
gaattcactgcggccgccatggagttccctgaggcgtccatcttc

SEQ ID NO: 43031 - DNA, 57 bp, Emericella nidulans
gttctcgagacgagcgatcgcttagatactgaaggacaaaccctctttagcagagat

SEQ ID NO: 43032 - DNA, 43 bp, Emericella nidulans
gaattcactgcggccgccatgtggaacaacccgcacctgcttg

SEQ ID NO: 43033 - DNA, 50 bp, Emericella nidulans
gttctcgagacgagcgatcgcctattcagcctcatcatcggtatcgggag

SEQ ID NO: 43034 - DNA, 45 bp, Emericella nidulans
gaattcactgcggccgccatgtccactccttcatccgtatcttcc

SEQ ID NO: 43035 - DNA, 49 bp, Emericella nidulans
gttctcgagacgagcgatcgctcataccatatagacatgccacttctca

SEQ ID NO: 43036 - DNA, 47 bp, Emericella nidulans
gaattcactgcggccgccatgcctggcgctatagaatcctccccatc

SEQ ID NO: 43037 - DNA, 48 bp, Emericella nidulans
gttctcgagacgagcgatcgcctatgatcccagggtccatagcctctc

SEQ ID NO: 43038 - DNA, 53 bp, Emericella nidulans
gaattcactgcggccgccatgtcttctatcgtcgctgtacatcaaaactacgg

SEQ ID NO: 43039 - DNA, 49 bp, Emericella nidulans
gttctcgagacgagcgatcgcttagagcttgacaaccctcgactccttc

SEQ ID NO: 43040 - DNA, 49 bp, Emericella nidulans
gaattcactgcggccgccatgccgtctagcaagcttcgcgaacgacata

SEQ ID NO: 43041 - DNA, 47 bp, Emericella nidulans
gttctcgagacgagcgatcgcctaacccattgggagttgcaggaagt

SEQ ID NO: 43042 - DNA, 51 bp, Emericella nidulans
gaattcactgcggccgccatgatcaaaagtggttccgaatggatctctaca

SEQ ID NO: 43043 - DNA, 45 bp, Emericella nidulans
gttctcgagacgagcgatcgcttaaggacgcagacgctgggggtc

SEQ ID NO: 43044 - DNA, 44 bp, Emericella nidulans
gaattcactgcggccgccatgacgccgtctaagacgcccagtcc

SEQ ID NO: 43045 - DNA, 52 bp, Emericella nidulans
gttctcgagacgagcgatcgctcattccaagtaaatctcctctcgtaaccgt

SEQ ID NO: 43046 - DNA, 44 bp, Emericella nidulans
gaattcactgcggccgccatgcaacctaaacgaacactggacga

SEQ ID NO: 43047 - DNA, 46 bp, Emericella nidulans
gttctcgagacgagcgatcgcttactcctcgtcatcatcatccaca

SEQ ID NO: 43048 - DNA, 45 bp, Emericella nidulans
gaattcactgcggccgccatggcccgtctttatggtgtcccagag

SEQ ID NO: 43049 - DNA, 52 bp, Emericella nidulans
gttctcgagacgagcgatcgcctaagcaacttcagcgtgctcagtattctcc

SEQ ID NO: 43050 - DNA, 39 bp, Emericella nidulans
gaattcactgcggccgccatgcacaccaaaacccacctc

SEQ ID NO: 43051 - DNA, 42 bp, Emericella nidulans
gttctcgagacgagcgatcgctcactcggcaatctcaacaat

SEQ ID NO: 43052 - DNA, 44 bp, Emericella nidulans
gaattcactgcggccgccatgagggtttccgcgtttgctttgct

SEQ ID NO: 43053 - DNA, 45 bp, Emericella nidulans
gttctcgagacgagcgatcgcttagagcttgccctgaccggcatt

SEQ ID NO: 43054 - DNA, 46 bp, Emericella nidulans
gaattcactgcggccgccatggtttatccattccagccctggagca

SEQ ID NO: 43055 - DNA, 46 bp, Emericella nidulans
gttctcgagacgagcgatcgcttacgaccggtagacgaccttggaa

SEQ ID NO: 43056 - DNA, 40 bp, Emericella nidulans
gaattcactgcggccgccatgcgtattcacgctgacgata

SEQ ID NO: 43057 - DNA, 41 bp, Emericella nidulans
gttctcgagacgagcgatcgcttaaagttcgtccttgagca

SEQ ID NO: 43058 - DNA, 47 bp, Emericella nidulans
gaattcactgcggccgccatgttcactcctctcttcgctgccacttc

SEQ ID NO: 43059 - DNA, 47 bp, Emericella nidulans
gttctcgagacgagcgatcgcttactgcttctcatgctgctcctgct

SEQ ID NO: 43060 - DNA, 45 bp, Emericella nidulans
gaattcactgcggccgccatgcctaaggccgtcgaggtcaccaaa

SEQ ID NO: 43061 - DNA, 46 bp, Emericella nidulans
gttctcgagacgagcgatcgcttatggcagctgggattcagcgaga

SEQ ID NO: 43062 - DNA, 47 bp, Emericella nidulans
gaattcactgcggccgccatgttcatcaagaacggcctgcttctctc

SEQ ID NO: 43063 - DNA, 48 bp, Emericella nidulans
gttctcgagacgagcgatcgcctagcactcatagagcgggtcagtgga

SEQ ID NO: 43064 - DNA, 45 bp, Emericella nidulans
gaattcactgcggccgccatgaataactcccaggccggtattttg

SEQ ID NO: 43065 - DNA, 45 bp, Emericella nidulans
gttctcgagacgagcgatcgcctacggcaaaaccgatgttagcac

SEQ ID NO: 43066 - DNA, 50 bp, Emericella nidulans
gaattcactgcggccgccatgaacatgatcggacaccctaagcacgctct

SEQ ID NO: 43067 - DNA, 47 bp, Emericella nidulans
gttctcgagacgagcgatcgctcacagcttggaaacactcctccctc

SEQ ID NO: 43068 - DNA, 45 bp, Emericella nidulans
gaattcactgcggccgccatggccgaagacgccgacgctcgtaat

SEQ ID NO: 43069 - DNA, 46 bp, Emericella nidulans
gttctcgagacgagcgatcgcctagcgcgcagagtgcacaagatca

SEQ ID NO: 43070 - DNA, 51 bp, Emericella nidulans
gaattcactgcggccgccatggtaaaggagctgcaagagatgaacgtcgaa

SEQ ID NO: 43071 - DNA, 48 bp, Emericella nidulans
gttctcgagacgagcgatcgcttacgggacagaatgtggcccattgaa

SEQ ID NO: 43072 - DNA, 51 bp, Emericella nidulans
gaattcactgcggccgccatggttgacaatgaggctatctacgacatctgc

SEQ ID NO: 43073 - DNA, 52 bp, Emericella nidulans
gttctcgagacgagcgatcgcttagtactcaacttcctcaccctcctcctcc

SEQ ID NO: 43074 - DNA, 46 bp, Emericella nidulans
gaattcactgcggccgccatgcttaatgaatctggctggcgcgatg

SEQ ID NO: 43075 - DNA, 51 bp, Emericella nidulans
gttctcgagacgagcgatcgctcactttggcacgtactctctctcttcacc

SEQ ID NO: 43076 - DNA, 53 bp, Emericella nidulans
gaattcactgcggccgccatggcgactgaagtacagaagatcaaggtcaagaa

SEQ ID NO: 43077 - DNA, 50 bp, Emericella nidulans
gttctcgagacgagcgatcgcctatagacgggccttcaagtttgccctga

SEQ ID NO: 43078 - DNA, 48 bp, Emericella nidulans
gaattcactgcggccgccatgctgtactccggtttctccgacacaatc

SEQ ID NO: 43079 - DNA, 41 bp, Emericella nidulans
gttctcgagacgagcgatcgcctagttgcccgggacgaggc

SEQ ID NO: 43080 - DNA, 39 bp, Emericella nidulans
gaattcactgcggccgccatgtccgcagtctgccggagc

SEQ ID NO: 43081 - DNA, 43 bp, Emericella nidulans
gttctcgagacgagcgatcgcttatcggggagtgggttgtggg

SEQ ID NO: 43082 - DNA, 41 bp, Emericella nidulans
gaattcactgcggccgccatgcgtcaatcctgcacccaatg

SEQ ID NO: 43083 - DNA, 48 bp, Emericella nidulans
gttctcgagacgagcgatcgcctaagccttgatgcagtactggtagcc

SEQ ID NO: 43084 - DNA, 45 bp, Emericella nidulans
gaattcactgcggccgccatggcctcggcaagccagaatgcaatg

SEQ ID NO: 43085 - DNA, 51 bp, Emericella nidulans
gttctcgagacgagcgatcgcttactggagagtcaatacaccaggaaccca

SEQ ID NO: 43086 - DNA, 44 bp, Emericella nidulans
gaattcactgcggccgccatgaagaaacacgcctgcacataccc

SEQ ID NO: 43087 - DNA, 46 bp, Emericella nidulans
gttctcgagacgagcgatcgctcaaacaccaagattcagcaagacc

SEQ ID NO: 43088 - DNA, 50 bp, Emericella nidulans
gaattcactgcggccgccatggctatcgatttacctttggaatatgagtc

SEQ ID NO: 43089 - DNA, 45 bp, Emericella nidulans
gttctcgagacgagcgatcgctcacttggcctgaggaacaacaat

SEQ ID NO: 43090 - DNA, 41 bp, Emericella nidulans
gaattcactgcggccgccatgtggcgcggtggttgcatcat

SEQ ID NO: 43091 - DNA, 47 bp, Emericella nidulans
gttctcgagacgagcgatcgcttaagcagtgtaggtcgaggcggaaa

SEQ ID NO: 43092 - DNA, 44 bp, Emericella nidulans
gaattcactgcggccgccatgggggaccgggctgtcaaattcat

SEQ ID NO: 43093 - DNA, 46 bp, Emericella nidulans
gttctcgagacgagcgatcgcctaagccaccgcattcaccttcact

SEQ ID NO: 43094 - DNA, 49 bp, Emericella nidulans
gaattcactgcggccgccatgcaggtaccgcttctacgtctccaatgtg

SEQ ID NO: 43095 - DNA, 44 bp, Emericella nidulans
gttctcgagacgagcgatcgctcagcggatcaaatgtcgtttcg

SEQ ID NO: 43096 - DNA, 45 bp, Emericella nidulans
gaattcactgcggccgccatggctttcttcccccgctactgctca

SEQ ID NO: 43097 - DNA, 48 bp, Emericella nidulans
gttctcgagacgagcgatcgcctactccacgcggactttcttgagttg

SEQ ID NO: 43098 - DNA, 41 bp, Emericella nidulans
gaattcactgcggccgccatgctggagggcctgtacgaaac

SEQ ID NO: 43099 - DNA, 40 bp, Emericella nidulans
gttctcgagacgagcgatcgctcacgcaacataaccgtat

SEQ ID NO: 43100 - DNA, 46 bp, Emericella nidulans
gaattcactgcggccgccatgaatcctggtgtcggtggtccggttg

SEQ ID NO: 43101 - DNA, 48 bp, Emericella nidulans
gttctcgagacgagcgatcgctcacactctcgggtttccgttagttgg

SEQ ID NO: 43102 - DNA, 49 bp, Emericella nidulans
gaattcactgcggccgccatgcactacaacgaacgcctcatcagcgaag

SEQ ID NO: 43103 - DNA, 56 bp, Emericella nidulans
gttctcgagacgagcgatcgctcattccttaatgtccacattatccttcatcttct

SEQ ID NO: 43104 - DNA, 45 bp, Emericella nidulans
gaattcactgcggccgccatgtctgttgtcattccgcccgttcct

SEQ ID NO: 43105 - DNA, 49 bp, Emericella nidulans
gttctcgagacgagcgatcgcctactgactccggacaaaaggcttgagg

SEQ ID NO: 43106 - DNA, 44 bp, Emericella nidulans
gaattcactgcggccgccatggagcgcgtaatgggcaccgaagt

SEQ ID NO: 43107 - DNA, 46 bp, Emericella nidulans
gttctcgagacgagcgatcgcctaaagcattctcgggctcgccttg

SEQ ID NO: 43108 - DNA, 47 bp, Emericella nidulans
gaattcactgcggccgccatgagaatcacctccattgcatcgctcgt

SEQ ID NO: 43109 - DNA, 45 bp, Emericella nidulans
gttctcgagacgagcgatcgcttacgcctggaacggaaacccact

SEQ ID NO: 43110 - DNA, 45 bp, Emericella nidulans
gaattcactgcggccgccatgaatgcccaacagcccatgcactcg

SEQ ID NO: 43111 - DNA, 45 bp, Emericella nidulans
gttctcgagacgagcgatcgctcaagcagcgagaattggttgcat

SEQ ID NO: 43112 - DNA, 50 bp, Emericella nidulans
gaattcactgcggccgccatgcgctttattcagaacctcctcccgctgct

SEQ ID NO: 43113 - DNA, 51 bp, Emericella nidulans
gttctcgagacgagcgatcgcctatcgatgaactgcctggtccataaggct

SEQ ID NO: 43114 - DNA, 56 bp, Emericella nidulans
gaattcactgcggccgccatgtccctgttcacgactactcctagtgtcagcagctt

SEQ ID NO: 43115 - DNA, 50 bp, Emericella nidulans
gttctcgagacgagcgatcgctcattgaatggtaatctttttcgcgttgg

SEQ ID NO: 43116 - DNA, 42 bp, Emericella nidulans
gaattcactgcggccgccatgcacgagcgcgatcgcaagaag

SEQ ID NO: 43117 - DNA, 49 bp, Emericella nidulans
gttctcgagacgagcgatcgcttaagccttcttctcatcctccgactca

SEQ ID NO: 43118 - DNA, 44 bp, Emericella nidulans
gaattcactgcggccgccatgccaggcccagctccgaacctttt

SEQ ID NO: 43119 - DNA, 51 bp, Emericella nidulans
gttctcgagacgagcgatcgcctaggttttcctatgtttctcacccccacc

SEQ ID NO: 43120 - DNA, 43 bp, Emericella nidulans
gaattcactgcggccgccatggagcaaccatcccaaccgcaag

SEQ ID NO: 43121 - DNA, 49 bp, Emericella nidulans
gttctcgagacgagcgatcgcctacagattcgtactcatccgatgcaca

SEQ ID NO: 43122 - DNA, 48 bp, Emericella nidulans
gaattcactgcggccgccatgagccaccttctaatactgaaacaacaa

SEQ ID NO: 43123 - DNA, 46 bp, Emericella nidulans
gttctcgagacgagcgatcgcttatcgaaactgagaccccaaactc

SEQ ID NO: 43124 - DNA, 49 bp, Emericella nidulans
gaattcactgcggccgccatgatttccgcacaggatgaaatcacatcaa

SEQ ID NO: 43125 - DNA, 51 bp, Emericella nidulans
gttctcgagacgagcgatcgcctacgcttcctgaagaaccagctccgcttt

SEQ ID NO: 43126 - DNA, 40 bp, Emericella nidulans
gaattcactgcggccgccatggaacaggccctgacgaagc

SEQ ID NO: 43127 - DNA, 45 bp, Emericella nidulans
gttctcgagacgagcgatcgctcaagctccttcttcgaccgacat

SEQ ID NO: 43128 - DNA, 39 bp, Emericella nidulans
gaattcactgcggccgccatggaccgtcgactgctggat

SEQ ID NO: 43129 - DNA, 49 bp, Emericella nidulans
gttctcgagacgagcgatcgctcaagtaatcaggaaatccatattcatc

SEQ ID NO: 43130 - DNA, 42 bp, Emericella nidulans
gaattcactgcggccgccatggccacctctgcgccccagacc

SEQ ID NO: 43131 - DNA, 51 bp, Emericella nidulans
gttctcgagacgagcgatcgctcactcatcatcatcattgctgtctctgtc

SEQ ID NO: 43132 - DNA, 46 bp, Emericella nidulans
gaattcactgcggccgccatgaccttcgtctacgaggccgacaaga

SEQ ID NO: 43133 - DNA, 39 bp, Emericella nidulans
gttctcgagacgagcgatcgctcaggcgcttgcgaggga

SEQ ID NO: 43134 - DNA, 40 bp, Emericella nidulans
gaattcactgcggccgccatggcgcgccagaaacaagcag

SEQ ID NO: 43135 - DNA, 44 bp, Emericella nidulans
gttctcgagacgagcgatcgctcactccgtcttctttgccttcg

SEQ ID NO: 43136 - DNA, 45 bp, Emericella nidulans
gaattcactgcggccgccatggctgacccaacgcttctcacgata

SEQ ID NO: 43137 - DNA, 48 bp, Emericella nidulans
gttctcgagacgagcgatcgctcaggaagaaccatccctcttctcctc

SEQ ID NO: 43138 - DNA, 50 bp, Emericella nidulans
gaattcactgcggccgccatgtatgttttgggatacctacctcgtgatgg

SEQ ID NO: 43139 - DNA, 44 bp, Emericella nidulans
gttctcgagacgagcgatcgctcatgcctccgtctccacctcct

SEQ ID NO: 43140 - DNA, 40 bp, Emericella nidulans
gaattcactgcggccgccatgccggctgctgcctcgacct

SEQ ID NO: 43141 - DNA, 54 bp, Emericella nidulans
gttctcgagacgagcgatcgcttagtatctcagtttcacctcgactggagaagg

SEQ ID NO: 43142 - DNA, 48 bp, Emericella nidulans
gaattcactgcggccgccatgcgtttctcttctctattcggcggtctc

SEQ ID NO: 43143 - DNA, 45 bp, Emericella nidulans
gttctcgagacgagcgatcgcctacgcgggcaccaaggaggaaac

SEQ ID NO: 43144 - DNA, 47 bp, Emericella nidulans
gaattcactgcggccgccatgcatcgggcagaacttctcggtatctc

SEQ ID NO: 43145 - DNA, 46 bp, Emericella nidulans
gttctcgagacgagcgatcgcctaagcatcaagcacgagcgctttc

SEQ ID NO: 43146 - DNA, 44 bp, Emericella nidulans
gaattcactgcggccgccatgtccgccgtccagctcaagttcaa

SEQ ID NO: 43147 - DNA, 44 bp, Emericella nidulans
gttctcgagacgagcgatcgcctaccggcggacaacgataccct

SEQ ID NO: 43148 - DNA, 46 bp, Emericella nidulans
gaattcactgcggccgccatggttgctgccaaccatattctgtacg

SEQ ID NO: 43149 - DNA, 50 bp, Emericella nidulans
gttctcgagacgagcgatcgcctagaacagcttgtgctcaagagtcatgt

SEQ ID NO: 43150 - DNA, 45 bp, Emericella nidulans
gaattcactgcggccgccatggcgacaaagcgaaagagcgtaagg

SEQ ID NO: 43151 - DNA, 53 bp, Emericella nidulans
gttctcgagacgagcgatcgcttactgctcagtctggaagtagttgaggagaa

SEQ ID NO: 43152 - DNA, 48 bp, Emericella nidulans
gaattcactgcggccgccatgctgagacacgacaaaaccagtctatcg

SEQ ID NO: 43153 - DNA, 44 bp, Emericella nidulans
gttctcgagacgagcgatcgctcatagctcgagataagccatgc

SEQ ID NO: 43154 - DNA, 40 bp, Emericella nidulans
gaattcactgcggccgccatgaaagcccttgagcgtgagc

SEQ ID NO: 43155 - DNA, 44 bp, Emericella nidulans
gttctcgagacgagcgatcgctcaaagatcgatcgggtcagagg

SEQ ID NO: 43156 - DNA, 53 bp, Emericella nidulans
gaattcactgcggccgccatggatcagggtataactgtttttcgcaagaatga

SEQ ID NO: 43157 - DNA, 54 bp, Emericella nidulans
gttctcgagacgagcgatcgcttatataggaggcttgtaagcggaaggagatcg

SEQ ID NO: 43158 - DNA, 42 bp, Emericella nidulans
gaattcactgcggccgccatggctgcagtcgaaatcaagaca

SEQ ID NO: 43159 - DNA, 39 bp, Emericella nidulans
gttctcgagacgagcgatcgctcaccacgtcaacggagc

SEQ ID NO: 43160 - DNA, 45 bp, Emericella nidulans
gaattcactgcggccgccatgtcttttcacctgcacccgacctcc

SEQ ID NO: 43161 - DNA, 48 bp, Emericella nidulans
gttctcgagacgagcgatcgctcaaatctgaccagtgtctttgctgga

SEQ ID NO: 43162 - DNA, 47 bp, Emericella nidulans
gaattcactgcggccgccatgaagagcagatgggtcggtcagcccac

SEQ ID NO: 43163 - DNA, 53 bp, Emericella nidulans
gttctcgagacgagcgatcgcttacacattcacgctatatcctaccccaactg

SEQ ID NO: 43164 - DNA, 48 bp, Emericella nidulans
gaattcactgcggccgccatgtacgtcagtcgccttttgctctttctg

SEQ ID NO: 43165 - DNA, 51 bp, Emericella nidulans
gttctcgagacgagcgatcgcctaaaggatgaagttctccagcacaaggtt

SEQ ID NO: 43166 - DNA, 50 bp, Emericella nidulans
gaattcactgcggccgccatggtgcatcgtgctttaaagttcgcgacaag

SEQ ID NO: 43167 - DNA, 55 bp, Emericella nidulans
gttctcgagacgagcgatcgcctacttcctaacatactttccctcagtcccatcc

SEQ ID NO: 43168 - DNA, 48 bp, Emericella nidulans
gaattcactgcggccgccatgcaactcaccaagaccctcagcctgctt

SEQ ID NO: 43169 - DNA, 43 bp, Emericella nidulans
gttctcgagacgagcgatcgctcagtgacgcccagcgccagac

SEQ ID NO: 43170 - DNA, 44 bp, Emericella nidulans
gaattcactgcggccgccatgtccctaaatccctcctccaaacc

SEQ ID NO: 43171 - DNA, 47 bp, Emericella nidulans
gttctcgagacgagcgatcgcttattggagcagactagtcgatgacg

SEQ ID NO: 43172 - DNA, 52 bp, Emericella nidulans
gaattcactgcggccgccatgtcttccctttactctgactgctccgccatgt

SEQ ID NO: 43173 - DNA, 51 bp, Emericella nidulans
gttctcgagacgagcgatcgcttaatctttggagaaagaaggtttcgcaga

SEQ ID NO: 43174 - DNA, 45 bp, Emericella nidulans
gaattcactgcggccgccatgcatctcgcaacggacggatacggt

SEQ ID NO: 43175 - DNA, 43 bp, Emericella nidulans
gttctcgagacgagcgatcgcttaaggcttcggcggggatgac

SEQ ID NO: 43176 - DNA, 47 bp, Emericella nidulans
gaattcactgcggccgccatgaatgttgaggaaccgaccaccgcaaa

SEQ ID NO: 43177 - DNA, 48 bp, Emericella nidulans
gttctcgagacgagcgatcgcttattcctccatccgtccaaaaacacc

SEQ ID NO: 43178 - DNA, 49 bp, Emericella nidulans
gaattcactgcggccgccatggccaaggacaagtctgagagaaaggaga

SEQ ID NO: 43179 - DNA, 51 bp, Emericella nidulans
gttctcgagacgagcgatcgcctataggttcacctgcgtgagttccttctg

SEQ ID NO: 43180 - DNA, 45 bp, Emericella nidulans
gaattcactgcggccgccatggacgccttcgagtacaacgccaac

SEQ ID NO: 43181 - DNA, 52 bp, Emericella nidulans
gttctcgagacgagcgatcgctcacgtcgtaatacagtaccgggagatcttg

SEQ ID NO: 43182 - DNA, 43 bp, Emericella nidulans
gaattcactgcggccgccatgggtggtctgctttcaggcatcg

SEQ ID NO: 43183 - DNA, 52 bp, Emericella nidulans
gttctcgagacgagcgatcgcctacgctaagcccttcaactcagtctcatgc

SEQ ID NO: 43184 - DNA, 45 bp, Emericella nidulans
gaattcactgcggccgccatgacaataaacccggaagtcgcaacg

SEQ ID NO: 43185 - DNA, 47 bp, Emericella nidulans
gttctcgagacgagcgatcgctcaatccatttcattctcctcgtcca

SEQ ID NO: 43186 - DNA, 42 bp, Emericella nidulans
gaattcactgcggccgccatgctggcgccggaactgaccaag

SEQ ID NO: 43187 - DNA, 45 bp, Emericella nidulans
gttctcgagacgagcgatcgctcatagcctgctcacggtcgagtc

SEQ ID NO: 43188 - DNA, 42 bp, Emericella nidulans
gaattcactgcggccgccatggccaatcttgccgttgtccac

SEQ ID NO: 43189 - DNA, 43 bp, Emericella nidulans
gttctcgagacgagcgatcgcttacgcaatcccatccatgttg

SEQ ID NO: 43190 - DNA, 51 bp, Emericella nidulans
gaattcactgcggccgccatgtcttgccagattgttcgtagttgcgggaaa

SEQ ID NO: 43191 - DNA, 45 bp, Emericella nidulans
gttctcgagacgagcgatcgctcaaaggtcgggcccattgagcat

SEQ ID NO: 43192 - DNA, 47 bp, Emericella nidulans
gaattcactgcggccgccatgcaacaagtcaagcgaaccaagcgagt

SEQ ID NO: 43193 - DNA, 47 bp, Emericella nidulans
gttctcgagacgagcgatcgctcacccggttgaccataatcttctcc

SEQ ID NO: 43194 - DNA, 45 bp, Emericella nidulans
gaattcactgcggccgccatgtcaaaaatcgcctcgaccttctcg

SEQ ID NO: 43195 - DNA, 55 bp, Emericella nidulans
gttctcgagacgagcgatcgcctaaacctgattcttaatcttggaaaccaacgtc

SEQ ID NO: 43196 - DNA, 45 bp, Emericella nidulans
gaattcactgcggccgccatgcgcgatgcgtacaacatcttcctc

SEQ ID NO: 43197 - DNA, 47 bp, Emericella nidulans
gttctcgagacgagcgatcgctcaagcagaggacttcttcgacccac

SEQ ID NO: 43198 - DNA, 48 bp, Emericella nidulans
gaattcactgcggccgccatgacagcggagtggattgagggagtacgg

SEQ ID NO: 43199 - DNA, 48 bp, Emericella nidulans
gttctcgagacgagcgatcgctcagttgtaaggcgtcaatccttgtgc

SEQ ID NO: 43200 - DNA, 48 bp, Emericella nidulans
gaattcactgcggccgccatggttcttctggatccagctcatctcgac

SEQ ID NO: 43201 - DNA, 45 bp, Emericella nidulans
gttctcgagacgagcgatcgcttagaccgagccccagccctgact

SEQ ID NO: 43202 - DNA, 45 bp, Emericella nidulans
gaattcactgcggccgccatgctcatgctcgagcccattctcatc

SEQ ID NO: 43203 - DNA, 55 bp, Emericella nidulans
gttctcgagacgagcgatcgcctagaaattaggtgagaacttgctgagcgcccta

SEQ ID NO: 43204 - DNA, 49 bp, Emericella nidulans
gaattcactgcggccgccatgcttccaatccagtatgtagacgcgaagg

SEQ ID NO: 43205 - DNA, 45 bp, Emericella nidulans
gttctcgagacgagcgatcgctcaacggttacgagggtgggctga

SEQ ID NO: 43206 - DNA, 51 bp, Emericella nidulans
gaattcactgcggccgccatgtatgctagcatgcccacattcattgtattc

SEQ ID NO: 43207 - DNA, 46 bp, Emericella nidulans
gttctcgagacgagcgatcgcttatgaatcccagtcgccagattcg

SEQ ID NO: 43208 - DNA, 43 bp, Emericella nidulans
gaattcactgcggccgccatgccggcacttcaatcgagcaagc

SEQ ID NO: 43209 - DNA, 47 bp, Emericella nidulans
gttctcgagacgagcgatcgctcacagccttatccacaacctggtca

SEQ ID NO: 43210 - DNA, 47 bp, Emericella nidulans
gaattcactgcggccgccatggttattgcctcagcggactacgaccc

SEQ ID NO: 43211 - DNA, 45 bp, Emericella nidulans
gttctcgagacgagcgatcgctcagccatcatcaccactcctccc

SEQ ID NO: 43212 - DNA, 45 bp, Emericella nidulans
gaattcactgcggccgccatgcacccttccggcaacgtctccttc

SEQ ID NO: 43213 - DNA, 45 bp, Emericella nidulans
gttctcgagacgagcgatcgcctaaacggcgtcgggaaacgtatg

SEQ ID NO: 43214 - DNA, 43 bp, Emericella nidulans
gaattcactgcggccgccatggccaccaacgggtcctcatcgt

SEQ ID NO: 43215 - DNA, 42 bp, Emericella nidulans
gttctcgagacgagcgatcgcctaccaagcccccacgatccc

SEQ ID NO: 43216 - DNA, 48 bp, Emericella nidulans
gaattcactgcggccgccatgaaaagctacgataataagccatcgtca

SEQ ID NO: 43217 - DNA, 46 bp, Emericella nidulans
gttctcgagacgagcgatcgcctaccctaccagccctacaacttcc

SEQ ID NO: 43218 - DNA, 39 bp, Emericella nidulans
gaattcactgcggccgccatgttcacgcccccgatggtc

SEQ ID NO: 43219 - DNA, 46 bp, Emericella nidulans
gttctcgagacgagcgatcgcttattcactggtgctaccaggatgc

SEQ ID NO: 43220 - DNA, 45 bp, Emericella nidulans
gaattcactgcggccgccatgccacccaaagagtcaaaagagaaa

SEQ ID NO: 43221 - DNA, 45 bp, Emericella nidulans
gttctcgagacgagcgatcgcttacagactcgacgcacattcctt

SEQ ID NO: 43222 - DNA, 45 bp, Emericella nidulans
gaattcactgcggccgccatgctggccgttccaatggtaactttc

SEQ ID NO: 43223 - DNA, 46 bp, Emericella nidulans
gttctcgagacgagcgatcgctcactgaaacattccctccatatcc

SEQ ID NO: 43224 - DNA, 41 bp, Emericella nidulans
gaattcactgcggccgccatgaagctctctagcgatgtgcc

SEQ ID NO: 43225 - DNA, 40 bp, Emericella nidulans
gttctcgagacgagcgatcgcttagacaatcccggcaagc

SEQ ID NO: 43226 - DNA, 52 bp, Emericella nidulans
gaattcactgcggccgccatgcctcctaagaagcctgatcaacctaagaaga

SEQ ID NO: 43227 - DNA, 46 bp, Emericella nidulans
gttctcgagacgagcgatcgctcagtcctcaccacctggctgttgc

SEQ ID NO: 43228 - DNA, 43 bp, Emericella nidulans
gaattcactgcggccgccatgcctgcacgtcttggaaggttcg

SEQ ID NO: 43229 - DNA, 49 bp, Emericella nidulans
gttctcgagacgagcgatcgcctagaaagcttcttcgctcgacgccgta

SEQ ID NO: 43230 - DNA, 45 bp, Emericella nidulans
gaattcactgcggccgccatgaagaagcgtgtcctctgcgtcttc

SEQ ID NO: 43231 - DNA, 46 bp, Emericella nidulans
gttctcgagacgagcgatcgctcaagccatcaactcgtcaatatcc

SEQ ID NO: 43232 - DNA, 42 bp, Emericella nidulans
gaattcactgcggccgccatgccggccgagctgctcaagaca

SEQ ID NO: 43233 - DNA, 47 bp, Emericella nidulans
gttctcgagacgagcgatcgcctacgagagccggagctcagcagctt

SEQ ID NO: 43234 - DNA, 44 bp, Emericella nidulans
gaattcactgcggccgccatggccggtcagcccctcattatcct

SEQ ID NO: 43235 - DNA, 47 bp, Emericella nidulans
gttctcgagacgagcgatcgctcacgaccgaccaagttttgcgttct

SEQ ID NO: 43236 - DNA, 45 bp, Emericella nidulans
gaattcactgcggccgccatgtcgcgccgtttggccttcttgttt

SEQ ID NO: 43237 - DNA, 50 bp, Emericella nidulans
gttctcgagacgagcgatcgctcacccaaaaatcttcaagaaaccccaga

SEQ ID NO: 43238 - DNA, 44 bp, Emericella nidulans
gaattcactgcggccgccatgatcctcagccttcccccgatgct

SEQ ID NO: 43239 - DNA, 53 bp, Emericella nidulans
gttctcgagacgagcgatcgcctattcagggttctttcttggtttctcaaagc

SEQ ID NO: 43240 - DNA, 50 bp, Emericella nidulans
gaattcactgcggccgccatggcagctcttatgcctattggagacattcc

SEQ ID NO: 43241 - DNA, 52 bp, Emericella nidulans
gttctcgagacgagcgatcgctcacggtatcaactgttcataagcctctaca

SEQ ID NO: 43242 - DNA, 54 bp, Emericella nidulans
gaattcactgcggccgccatgggaatcaagcacctctatcaagtgatcgcagaa

SEQ ID NO: 43243 - DNA, 50 bp, Emericella nidulans
gttctcgagacgagcgatcgcctatacagcagctcgtggtcgagccttcg

SEQ ID NO: 43244 - DNA, 43 bp, Emericella nidulans
gaattcactgcggccgccatgtccataccgaccgctctggcac

SEQ ID NO: 43245 - DNA, 44 bp, Emericella nidulans
gttctcgagacgagcgatcgctcagtgggtgaggccgctttgtt

SEQ ID NO: 43246 - DNA, 44 bp, Emericella nidulans
gaattcactgcggccgccatggctcccatcacagatgacgtggt

SEQ ID NO: 43247 - DNA, 49 bp, Emericella nidulans
gttctcgagacgagcgatcgcttagttcttattgttgaagacaccgaga

SEQ ID NO: 43248 - DNA, 40 bp, Emericella nidulans
gaattcactgcggccgccatgtccagtctgctcggtcagg

SEQ ID NO: 43249 - DNA, 41 bp, Emericella nidulans
gttctcgagacgagcgatcgctcagtgctggccctgtccct

SEQ ID NO: 43250 - DNA, 43 bp, Emericella nidulans
gaattcactgcggccgccatgaagctgtctctcctcgctgctg

SEQ ID NO: 43251 - DNA, 44 bp, Emericella nidulans
gttctcgagacgagcgatcgcctaagcgcgtctgtggctgaagt

SEQ ID NO: 43252 - DNA, 45 bp, Emericella nidulans
gaattcactgcggccgccatggcgctgttcttgaccggctacctt

SEQ ID NO: 43253 - DNA, 48 bp, Emericella nidulans
gttctcgagacgagcgatcgcttacacagccggatcatccagcccatc

SEQ ID NO: 43254 - DNA, 42 bp, Emericella nidulans
gaattcactgcggccgccatggattacggcaacgcaagctct

SEQ ID NO: 43255 - DNA, 54 bp, Emericella nidulans
gttctcgagacgagcgatcgcctaaatggtacaaataatcttccccttagtttg

SEQ ID NO: 43256 - DNA, 40 bp, Emericella nidulans
gaattcactgcggccgccatgtccaagcaccgcgaggaag

SEQ ID NO: 43257 - DNA, 46 bp, Emericella nidulans
gttctcgagacgagcgatcgcctacatctccctcaactcatcatgc

SEQ ID NO: 43258 - DNA, 40 bp, Emericella nidulans
gaattcactgcggccgccatggcccagttgccagggacag

SEQ ID NO: 43259 - DNA, 40 bp, Emericella nidulans
gttctcgagacgagcgatcgcttacgcccgtaagggctcc

SEQ ID NO: 43260 - DNA, 45 bp, Emericella nidulans
gaattcactgcggccgccatgggcgcgcatctagcgacagaaaag

SEQ ID NO: 43261 - DNA, 46 bp, Emericella nidulans
gttctcgagacgagcgatcgcctaaaccatgccccggatagtcacc

SEQ ID NO: 43262 - DNA, 40 bp, Emericella nidulans
gaattcactgcggccgccatggccgccggtgggggtagag

SEQ ID NO: 43263 - DNA, 54 bp, Emericella nidulans
gttctcgagacgagcgatcgctcaaatgacattgacagtatgatccactgggac

SEQ ID NO: 43264 - DNA, 44 bp, Emericella nidulans
gaattcactgcggccgccatgagcgcgtcgagaatagggcgaag

SEQ ID NO: 43265 - DNA, 45 bp, Emericella nidulans
gttctcgagacgagcgatcgcctacgtccgcttgggcctcaaaac

SEQ ID NO: 43266 - DNA, 41 bp, Emericella nidulans
gaattcactgcggccgccatgtatcaggaacccacctggtc

SEQ ID NO: 43267 - DNA, 39 bp, Emericella nidulans
gttctcgagacgagcgatcgctcaggaatcgtcaactgg

SEQ ID NO: 43268 - DNA, 41 bp, Emericella nidulans
gaattcactgcggccgccatgaccaagcccacgccgtccat

SEQ ID NO: 43269 - DNA, 54 bp, Emericella nidulans
gttctcgagacgagcgatcgcttattgcacagcatctttgctaagtttttcaga

SEQ ID NO: 43270 - DNA, 42 bp, Emericella nidulans
gaattcactgcggccgccatgtgccagaaccgagttatcttc

SEQ ID NO: 43271 - DNA, 45 bp, Emericella nidulans
gttctcgagacgagcgatcgcttatatcctaggtccttccagaat

SEQ ID NO: 43272 - DNA, 55 bp, Emericella nidulans
gaattcactgcggccgccatggcttactttcgcgcattgagaacttcttacatct

SEQ ID NO: 43273 - DNA, 48 bp, Emericella nidulans
gttctcgagacgagcgatcgctcaatccagctcagttacagtccctcc

SEQ ID NO: 43274 - DNA, 51 bp, Emericella nidulans
gaattcactgcggccgccatggagggaactatgccagcaaatgagtatgtg

SEQ ID NO: 43275 - DNA, 47 bp, Emericella nidulans
gttctcgagacgagcgatcgcttaacgatcatcctcctcgtccacag

SEQ ID NO: 43276 - DNA, 43 bp, Emericella nidulans
gaattcactgcggccgccatgctcagcatccccgcaacaaagg

SEQ ID NO: 43277 - DNA, 48 bp, Emericella nidulans
gttctcgagacgagcgatcgcctaattcgaccccgtggtagggcgagt

SEQ ID NO: 43278 - DNA, 45 bp, Emericella nidulans
gaattcactgcggccgccatggcgcttgcgacagaatgccagaaa

SEQ ID NO: 43279 - DNA, 45 bp, Emericella nidulans
gttctcgagacgagcgatcgcctaaccgcccgccacaacagcaag

SEQ ID NO: 43280 - DNA, 57 bp, Emericella nidulans
gaattcactgcggccgccatggacgtcatcaactttatcagtaaggatcaggcgttc

SEQ ID NO: 43281 - DNA, 54 bp, Emericella nidulans
gttctcgagacgagcgatcgctcagacagtcgatgtcttgtatttcttccattc

SEQ ID NO: 43282 - DNA, 44 bp, Emericella nidulans
gaattcactgcggccgccatgatcgtctccccgcatagagatgt

SEQ ID NO: 43283 - DNA, 41 bp, Emericella nidulans
gttctcgagacgagcgatcgcttacgactcgggagccttgg

SEQ ID NO: 43284 - DNA, 49 bp, Emericella nidulans
gaattcactgcggccgccatgactctttcaaagttgcaaggggtcaagc

SEQ ID NO: 43285 - DNA, 47 bp, Emericella nidulans
gttctcgagacgagcgatcgctcagacaatattgcacgtggaaccca

SEQ ID NO: 43286 - DNA, 42 bp, Emericella nidulans
gaattcactgcggccgccatggcagagcgcttcgccgcacac

SEQ ID NO: 43287 - DNA, 48 bp, Emericella nidulans
gttctcgagacgagcgatcgctcacagacccttagcacgtttcgcatc

SEQ ID NO: 43288 - DNA, 44 bp, Emericella nidulans
gaattcactgcggccgccatgcgcttcgctcctttcctcctgct

SEQ ID NO: 43289 - DNA, 48 bp, Emericella nidulans
gttctcgagacgagcgatcgcctagatcccccagtaccagttgccttc

SEQ ID NO: 43290 - DNA, 55 bp, Emericella nidulans
gaattcactgcggccgccatgctacaaccaccaaaatcttcaggcctcaacgtaa

SEQ ID NO: 43291 - DNA, 46 bp, Emericella nidulans
gttctcgagacgagcgatcgcctacaaggcattcaaagccgcagga

SEQ ID NO: 43292 - DNA, 42 bp, Emericella nidulans
gaattcactgcggccgccatggcgcagaacgccgaagcgact

SEQ ID NO: 43293 - DNA, 46 bp, Emericella nidulans
gttctcgagacgagcgatcgctcaagctgcgcgcacgcgtattcta

SEQ ID NO: 43294 - DNA, 49 bp, Emericella nidulans
gaattcactgcggccgccatgatttttgaagaggggacctcgtatcgtc

SEQ ID NO: 43295 - DNA, 50 bp, Emericella nidulans
gttctcgagacgagcgatcgcctagacacccgaatcatactgctcaaccc

SEQ ID NO: 43296 - DNA, 44 bp, Emericella nidulans
gaattcactgcggccgccatggcgtctccaaggcttccgttcct

SEQ ID NO: 43297 - DNA, 50 bp, Emericella nidulans
gttctcgagacgagcgatcgctcaatagtgtgatagctggagttgggagc

SEQ ID NO: 43298 - DNA, 45 bp, Emericella nidulans
gaattcactgcggccgccatgtgtgtggacgtcgacgatgagagg

SEQ ID NO: 43299 - DNA, 49 bp, Emericella nidulans
gttctcgagacgagcgatcgcttagtacgtcgcagagagacgctgcact

SEQ ID NO: 43300 - DNA, 46 bp, Emericella nidulans
gaattcactgcggccgccatggcgtacgatggctttcagcctggtt

SEQ ID NO: 43301 - DNA, 53 bp, Emericella nidulans
gttctcgagacgagcgatcgcttaccggtaacctttgtagtcataccccgatg

SEQ ID NO: 43302 - DNA, 43 bp, Emericella nidulans
gaattcactgcggccgccatggccaatggcaagaagctgccac

SEQ ID NO: 43303 - DNA, 46 bp, Emericella nidulans
gttctcgagacgagcgatcgctcaaaccttggcccagaaaagagtg

SEQ ID NO: 43304 - DNA, 44 bp, Emericella nidulans
gaattcactgcggccgccatgaccgactacgacgtggtgattgt

SEQ ID NO: 43305 - DNA, 47 bp, Emericella nidulans
gttctcgagacgagcgatcgctcaaccagatttagagcagagtgacc

SEQ ID NO: 43306 - DNA, 46 bp, Emericella nidulans
gaattcactgcggccgccatgggcgtcgacgactcctacatccttc

SEQ ID NO: 43307 - DNA, 48 bp, Emericella nidulans
gttctcgagacgagcgatcgcttattggaccctctccacgttctcagc

SEQ ID NO: 43308 - DNA, 45 bp, Emericella nidulans
gaattcactgcggccgccatgctgcagttcaccgttcgtcagctc

SEQ ID NO: 43309 - DNA, 48 bp, Emericella nidulans
gttctcgagacgagcgatcgctcactctttctccacctgtccgacaat

SEQ ID NO: 43310 - DNA, 50 bp, Emericella nidulans
gaattcactgcggccgccatgaacaagccaaaacggctgatctacatctc

SEQ ID NO: 43311 - DNA, 49 bp, Emericella nidulans
gttctcgagacgagcgatcgcctaagcaggaatcttcagtccggtcttc

SEQ ID NO: 43312 - DNA, 45 bp, Emericella nidulans
gaattcactgcggccgccatgacagacctcacaccgctatttacc

SEQ ID NO: 43313 - DNA, 56 bp, Emericella nidulans
gttctcgagacgagcgatcgcttatacgagaaagaataagagattagtttcgcttt

SEQ ID NO: 43314 - DNA, 54 bp, Emericella nidulans
gaattcactgcggccgccatggagaagactcatggttgggtgtacatgcgatct

SEQ ID NO: 43315 - DNA, 46 bp, Emericella nidulans
gttctcgagacgagcgatcgcttagagaccaccagggccggggtta

SEQ ID NO: 43316 - DNA, 44 bp, Emericella nidulans
gaattcactgcggccgccatgccgccaaagtcaaccgaactctg

SEQ ID NO: 43317 - DNA, 55 bp, Emericella nidulans
gttctcgagacgagcgatcgcttagacgttgatcgtaactttgagtttgataggg

SEQ ID NO: 43318 - DNA, 50 bp, Emericella nidulans
gaattcactgcggccgccatggatattcttgaagttgtcctcgaaaatca

SEQ ID NO: 43319 - DNA, 51 bp, Emericella nidulans
gttctcgagacgagcgatcgcttaagtagacctctccttttgggtaatctc

SEQ ID NO: 43320 - DNA, 41 bp, Emericella nidulans
gaattcactgcggccgccatgcggctcacctcgatcccaat

SEQ ID NO: 43321 - DNA, 39 bp, Emericella nidulans
gttctcgagacgagcgatcgcctacgccggcaacactgc

SEQ ID NO: 43322 - DNA, 50 bp, Emericella nidulans
gaattcactgcggccgccatgtcggaccctttactttttgaagacacctt

SEQ ID NO: 43323 - DNA, 48 bp, Emericella nidulans
gttctcgagacgagcgatcgcttacatgttcccaggagaatccgaggc

SEQ ID NO: 43324 - DNA, 44 bp, Emericella nidulans
gaattcactgcggccgccatgtctcccacagccattgagaccgt

SEQ ID NO: 43325 - DNA, 47 bp, Emericella nidulans
gttctcgagacgagcgatcgctcaattgaaggtctgcattttggcac

SEQ ID NO: 43326 - DNA, 49 bp, Emericella nidulans
gaattcactgcggccgccatgttcctcgaaatcttcaccgtcctactcc

SEQ ID NO: 43327 - DNA, 44 bp, Emericella nidulans
gttctcgagacgagcgatcgcctaaagatgtcgtcggccgcctc

SEQ ID NO: 43328 - DNA, 48 bp, Emericella nidulans
gaattcactgcggccgccatggtgtcgtttcttcagtggttcgcgttc

SEQ ID NO: 43329 - DNA, 47 bp, Emericella nidulans
gttctcgagacgagcgatcgcttaagccagcatctcactgcatcgac

SEQ ID NO: 43330 - DNA, 43 bp, Emericella nidulans
gaattcactgcggccgccatgaaggtgggtgtactccggaagg

SEQ ID NO: 43331 - DNA, 43 bp, Emericella nidulans
gttctcgagacgagcgatcgcttacaccgcttcatcatcccac

SEQ ID NO: 43332 - DNA, 41 bp, Emericella nidulans
gaattcactgcggccgccatgaagctccagcttcatctgac

SEQ ID NO: 43333 - DNA, 39 bp, Emericella nidulans
gttctcgagacgagcgatcgcctatccccagggatctgc

SEQ ID NO: 43334 - DNA, 45 bp, Emericella nidulans
gaattcactgcggccgccatgccgatgccaatgacgctgtatctg

SEQ ID NO: 43335 - DNA, 49 bp, Emericella nidulans
gttctcgagacgagcgatcgcttaagcgaagcacgccttatttgccctc

SEQ ID NO: 43336 - DNA, 43 bp, Emericella nidulans
gaattcactgcggccgccatggcctcggctcgcagtccacgat

SEQ ID NO: 43337 - DNA, 43 bp, Emericella nidulans
gttctcgagacgagcgatcgctcaggcttcagcctgggtcgtc

SEQ ID NO: 43338 - DNA, 42 bp, Emericella nidulans
gaattcactgcggccgccatgaagcgtgggcgggaatgggag

SEQ ID NO: 43339 - DNA, 48 bp, Emericella nidulans
gttctcgagacgagcgatcgcttacgcagctgtttccgacttgccaac

SEQ ID NO: 43340 - DNA, 40 bp, Emericella nidulans
gaattcactgcggccgccatgcccctcgtcgcccagaacc

SEQ ID NO: 43341 - DNA, 47 bp, Emericella nidulans
gttctcgagacgagcgatcgcctatgccttcgactttcgcttgaaca

SEQ ID NO: 43342 - DNA, 44 bp, Emericella nidulans
gaattcactgcggccgccatgccgtaccagccgatgaacgaagc

SEQ ID NO: 43343 - DNA, 48 bp, Emericella nidulans
gttctcgagacgagcgatcgcctaccgagaccgtcgatagatcaaccc

SEQ ID NO: 43344 - DNA, 45 bp, Emericella nidulans
gaattcactgcggccgccatgatacttggcggctacgaccgctac

SEQ ID NO: 43345 - DNA, 52 bp, Emericella nidulans
gttctcgagacgagcgatcgcttaagcagaagtaacgaggtccttcttgagg

SEQ ID NO: 43346 - DNA, 51 bp, Emericella nidulans
gaattcactgcggccgccatgcataagatcatcgacgcctacgagaaagtc

SEQ ID NO: 43347 - DNA, 47 bp, Emericella nidulans
gttctcgagacgagcgatcgcctacgcaaactcagccataaggtccc

SEQ ID NO: 43348 - DNA, 57 bp, Emericella nidulans
gaattcactgcggccgccatgcatccatccttaccctctatcatttacgacgcttcc

SEQ ID NO: 43349 - DNA, 45 bp, Emericella nidulans
gttctcgagacgagcgatcgctcaaccaaccagtgcacgtatccc

SEQ ID NO: 43350 - DNA, 44 bp, Emericella nidulans
gaattcactgcggccgccatggctcccttgccaccagacatcat

SEQ ID NO: 43351 - DNA, 44 bp, Emericella nidulans
gttctcgagacgagcgatcgcctagaaaccgccctgtccaggct

SEQ ID NO: 43352 - DNA, 46 bp, Emericella nidulans
gaattcactgcggccgccatgggcgaagcctatatccccattgcat

SEQ ID NO: 43353 - DNA, 47 bp, Emericella nidulans
gttctcgagacgagcgatcgcctatcccgccaggttctgaaagtctg

SEQ ID NO: 43354 - DNA, 41 bp, Emericella nidulans
gaattcactgcggccgccatggctctgaaaacggcttctgg

SEQ ID NO: 43355 - DNA, 46 bp, Emericella nidulans
gttctcgagacgagcgatcgcctagacggaaaggacaagctgggag

SEQ ID NO: 43356 - DNA, 44 bp, Emericella nidulans
gaattcactgcggccgccatggctgctctctacagagccattct

SEQ ID NO: 43357 - DNA, 40 bp, Emericella nidulans
gttctcgagacgagcgatcgctcacccactatgccgttcc

SEQ ID NO: 43358 - DNA, 44 bp, Emericella nidulans
gaattcactgcggccgccatgctcggcccggtctacaagacata

SEQ ID NO: 43359 - DNA, 47 bp, Emericella nidulans
gttctcgagacgagcgatcgcttatagacgggaagagtggatgatct

SEQ ID NO: 43360 - DNA, 49 bp, Emericella nidulans
gaattcactgcggccgccatgggtcagaaaacccagcttgacatcattc

SEQ ID NO: 43361 - DNA, 52 bp, Emericella nidulans
gttctcgagacgagcgatcgcttactcgtcactgtcattatcgagcacaatc

SEQ ID NO: 43362 - DNA, 46 bp, Emericella nidulans
gaattcactgcggccgccatgcctaaatacctcgagtccacgctcc

SEQ ID NO: 43363 - DNA, 44 bp, Emericella nidulans
gttctcgagacgagcgatcgctcagaaggaatcggtgatcttgc

SEQ ID NO: 43364 - DNA, 43 bp, Emericella nidulans
gaattcactgcggccgccatggtacgaatccgcgtcgactccc

SEQ ID NO: 43365 - DNA, 46 bp, Emericella nidulans
gttctcgagacgagcgatcgcttagtccaaggcctgcgcctcacac

SEQ ID NO: 43366 - DNA, 39 bp, Emericella nidulans
gaattcactgcggccgccatgagtcgggccaagaacgtc

SEQ ID NO: 43367 - DNA, 45 bp, Emericella nidulans
gttctcgagacgagcgatcgcctacctccaggaagtgcttattgt

SEQ ID NO: 43368 - DNA, 46 bp, Emericella nidulans
gaattcactgcggccgccatggttgggttctaccacgacctgttgg

SEQ ID NO: 43369 - DNA, 51 bp, Emericella nidulans
gttctcgagacgagcgatcgcctagtggttgttattcatttcggtctgacg

SEQ ID NO: 43370 - DNA, 47 bp, Emericella nidulans
gaattcactgcggccgccatgagaaagctattctcatcaggcgccac

SEQ ID NO: 43371 - DNA, 47 bp, Emericella nidulans
gttctcgagacgagcgatcgctcaatgccagcaaggagtcacatccc

SEQ ID NO: 43372 - DNA, 45 bp, Emericella nidulans
gaattcactgcggccgccatggaccacgctctgttcacggaagaa

SEQ ID NO: 43373 - DNA, 47 bp, Emericella nidulans
gttctcgagacgagcgatcgcctaggcctcctcttcaacagcacagg

SEQ ID NO: 43374 - DNA, 50 bp, Emericella nidulans
gaattcactgcggccgccatgaagcttttcttcgtctcgattcttcttgc

SEQ ID NO: 43375 - DNA, 47 bp, Emericella nidulans
gttctcgagacgagcgatcgcttacccgtcggaattgtcagactcct

SEQ ID NO: 43376 - DNA, 40 bp, Emericella nidulans
gaattcactgcggccgccatggccgccgtcgcagagaatg

SEQ ID NO: 43377 - DNA, 50 bp, Emericella nidulans
gttctcgagacgagcgatcgcttaaacagtgtatttggccttggctcttg

SEQ ID NO: 43378 - DNA, 42 bp, Emericella nidulans
gaattcactgcggccgccatgctctgggagcggccgggtgat

SEQ ID NO: 43379 - DNA, 45 bp, Emericella nidulans
gttctcgagacgagcgatcgctcacgaagggtatcgcggtgacat

SEQ ID NO: 43380 - DNA, 40 bp, Emericella nidulans
gaattcactgcggccgccatgtccgtccctaccttcactg

SEQ ID NO: 43381 - DNA, 41 bp, Emericella nidulans
gttctcgagacgagcgatcgcttagttggttccgatcgact

SEQ ID NO: 43382 - DNA, 41 bp, Emericella nidulans
gaattcactgcggccgccatggccgaggttaatcgccacga

SEQ ID NO: 43383 - DNA, 44 bp, Emericella nidulans
gttctcgagacgagcgatcgctcacttccccagctgttcgtacc

SEQ ID NO: 43384 - DNA, 43 bp, Emericella nidulans
gaattcactgcggccgccatgaccctcaatgcatggtatagcg

SEQ ID NO: 43385 - DNA, 45 bp, Emericella nidulans
gttctcgagacgagcgatcgcttaggtgtctaacaacgctccaga

SEQ ID NO: 43386 - DNA, 51 bp, Emericella nidulans
gaattcactgcggccgccatggtagacgaagcccctcatatcgctatcatc

SEQ ID NO: 43387 - DNA, 43 bp, Emericella nidulans
gttctcgagacgagcgatcgctcacgccgtcaatccgtcaatg

SEQ ID NO: 43388 - DNA, 43 bp, Emericella nidulans
gaattcactgcggccgccatgccggcaggttcagtcgttggaa

SEQ ID NO: 43389 - DNA, 46 bp, Emericella nidulans
gttctcgagacgagcgatcgcttaggttgactccgaaacgggaacc

SEQ ID NO: 43390 - DNA, 51 bp, Emericella nidulans
gaattcactgcggccgccatgcgaatccgatatccttttgcaggccttctt

SEQ ID NO: 43391 - DNA, 51 bp, Emericella nidulans
gttctcgagacgagcgatcgcttagtcattcctcttcccttctgcaagacc

SEQ ID NO: 43392 - DNA, 54 bp, Emericella nidulans
gaattcactgcggccgccatggagactgttaagaacgccgtcaactacgtttcc

SEQ ID NO: 43393 - DNA, 53 bp, Emericella nidulans
gttctcgagacgagcgatcgcttagttcttagcggcctctgtgatattgtcag

SEQ ID NO: 43394 - DNA, 44 bp, Emericella nidulans
gaattcactgcggccgccatgaacctgtcgtcatccatcattcc

SEQ ID NO: 43395 - DNA, 44 bp, Emericella nidulans
gttctcgagacgagcgatcgctcagggcacttctttatcgcctc

SEQ ID NO: 43396 - DNA, 47 bp, Emericella nidulans
gaattcactgcggccgccatgcgctaccaagggacctggctccttac

SEQ ID NO: 43397 - DNA, 50 bp, Emericella nidulans
gttctcgagacgagcgatcgctcaccacattgaaaagtccgtctgatttg

SEQ ID NO: 43398 - DNA, 47 bp, Emericella nidulans
gaattcactgcggccgccatgggtctcccgaccttcctctacaacca

SEQ ID NO: 43399 - DNA, 52 bp, Emericella nidulans
gttctcgagacgagcgatcgcttacttgaactcctccataatttggggcttg

SEQ ID NO: 43400 - DNA, 45 bp, Emericella nidulans
gaattcactgcggccgccatggcttccccgctttctgctgaggat

SEQ ID NO: 43401 - DNA, 54 bp, Emericella nidulans
gttctcgagacgagcgatcgcttacagaaagtttataccaattccgagttgcag

SEQ ID NO: 43402 - DNA, 39 bp, Emericella nidulans
gaattcactgcggccgccatgcctgggatgatcgagggt

SEQ ID NO: 43403 - DNA, 41 bp, Emericella nidulans
gttctcgagacgagcgatcgctcagcggtagatctttgtcc

SEQ ID NO: 43404 - DNA, 46 bp, Emericella nidulans
gaattcactgcggccgccatgcagagcgaaacccggagtatccaga

SEQ ID NO: 43405 - DNA, 47 bp, Emericella nidulans
gttctcgagacgagcgatcgcctattgtgcagcgggagttgcatacc

SEQ ID NO: 43406 - DNA, 46 bp, Emericella nidulans
gaattcactgcggccgccatgtctgcgctgaatccactatgccagt

SEQ ID NO: 43407 - DNA, 49 bp, Emericella nidulans
gttctcgagacgagcgatcgcttagaggtcggcaaataatgcacggagc

SEQ ID NO: 43408 - DNA, 46 bp, Emericella nidulans
gaattcactgcggccgccatgagtttcctcgggcttctgctgtctg

SEQ ID NO: 43409 - DNA, 46 bp, Emericella nidulans
gttctcgagacgagcgatcgcctagcgagggccgttaacccccaaa

SEQ ID NO: 43410 - DNA, 44 bp, Emericella nidulans
gaattcactgcggccgccatgattgacacttgccgcggtgtcct

SEQ ID NO: 43411 - DNA, 47 bp, Emericella nidulans
gttctcgagacgagcgatcgctcaagcgacctttcgtccaacattgc

SEQ ID NO: 43412 - DNA, 42 bp, Emericella nidulans
gaattcactgcggccgccatgtttcaagatccgggcgccatc

SEQ ID NO: 43413 - DNA, 49 bp, Emericella nidulans
gttctcgagacgagcgatcgcctatagttcatcgcgcacaacaattgga

SEQ ID NO: 43414 - DNA, 44 bp, Emericella nidulans
gaattcactgcggccgccatgcggaatgctgcatgcgatacgtt

SEQ ID NO: 43415 - DNA, 50 bp, Emericella nidulans
gttctcgagacgagcgatcgctcacttcatcaagagatttacggcccaag

SEQ ID NO: 43416 - DNA, 45 bp, Emericella nidulans
gaattcactgcggccgccatgtgggctatggacttggggaccttg

SEQ ID NO: 43417 - DNA, 49 bp, Emericella nidulans
gttctcgagacgagcgatcgcctaacgatgcctcgtcttctcgagtttc

SEQ ID NO: 43418 - DNA, 54 bp, Emericella nidulans
gaattcactgcggccgccatgactctacagccatctattctgaacgaggcatct

SEQ ID NO: 43419 - DNA, 50 bp, Emericella nidulans
gttctcgagacgagcgatcgctcagtactgtatttgaagggttggggcac

SEQ ID NO: 43420 - DNA, 48 bp, Emericella nidulans
gaattcactgcggccgccatgggtcagatcgggttcatgattgcgaag

SEQ ID NO: 43421 - DNA, 51 bp, Emericella nidulans
gttctcgagacgagcgatcgcctacagcacactcttcggcttgattagatg

SEQ ID NO: 43422 - DNA, 45 bp, Emericella nidulans
gaattcactgcggccgccatgtctcacgaggaagatctcattgac

SEQ ID NO: 43423 - DNA, 46 bp, Emericella nidulans
gttctcgagacgagcgatcgcctaagccatgtaggtgctagagtcg

SEQ ID NO: 43424 - DNA, 40 bp, Emericella nidulans
gaattcactgcggccgccatggtcaagagcgccatcaccc

SEQ ID NO: 43425 - DNA, 46 bp, Emericella nidulans
gttctcgagacgagcgatcgcttactttgatacgttccggctaaca

SEQ ID NO: 43426 - DNA, 47 bp, Emericella nidulans
gaattcactgcggccgccatgcgaacgacaatcatgacctctttctt

SEQ ID NO: 43427 - DNA, 46 bp, Emericella nidulans
gttctcgagacgagcgatcgcttacgatgtaaaagttggcgaatgc

SEQ ID NO: 43428 - DNA, 44 bp, Emericella nidulans
gaattcactgcggccgccatgttctgggggtattcactcaccta

SEQ ID NO: 43429 - DNA, 40 bp, Emericella nidulans
gttctcgagacgagcgatcgcctacgcccttttcgtctcg

SEQ ID NO: 43430 - DNA, 47 bp, Emericella nidulans
gaattcactgcggccgccatggacatcccctcgattgaccccagcta

SEQ ID NO: 43431 - DNA, 44 bp, Emericella nidulans
gttctcgagacgagcgatcgctcagaggaacccttcgcccagtc

SEQ ID NO: 43432 - DNA, 45 bp, Emericella nidulans
gaattcactgcggccgccatggaggaagcagatgctctggcccac

SEQ ID NO: 43433 - DNA, 51 bp, Emericella nidulans
gttctcgagacgagcgatcgcttagccagaatcctgctcgctaatatgatg

SEQ ID NO: 43434 - DNA, 45 bp, Emericella nidulans
gaattcactgcggccgccatgcgctacaccttcttctccgtttca

SEQ ID NO: 43435 - DNA, 44 bp, Emericella nidulans
gttctcgagacgagcgatcgcttacacttgtttgacgggtttgc

SEQ ID NO: 43436 - DNA, 47 bp, Emericella nidulans
gaattcactgcggccgccatgacagcctcgaacgatccgttgtggag

SEQ ID NO: 43437 - DNA, 53 bp, Emericella nidulans
gttctcgagacgagcgatcgctcacttggggttatatgcatcttctttacgtc

SEQ ID NO: 43438 - DNA, 45 bp, Emericella nidulans
gaattcactgcggccgccatgcctggcgtaatcctgatccccact

SEQ ID NO: 43439 - DNA, 54 bp, Emericella nidulans
gttctcgagacgagcgatcgcctattctttatgctcccctgtcagtccagcaag

SEQ ID NO: 43440 - DNA, 42 bp, Emericella nidulans
gaattcactgcggccgccatgatcgccttctgggtgggctac

SEQ ID NO: 43441 - DNA, 44 bp, Emericella nidulans
gttctcgagacgagcgatcgcttaagccctctcttcctgcgaga

SEQ ID NO: 43442 - DNA, 45 bp, Emericella nidulans
gaattcactgcggccgccatgccataccgccaaggtcacgattct

SEQ ID NO: 43443 - DNA, 45 bp, Emericella nidulans
gttctcgagacgagcgatcgcctaaccggcagctcgccagtacca

SEQ ID NO: 43444 - DNA, 44 bp, Emericella nidulans
gaattcactgcggccgccatgggcgacatccacctccgcctttt

SEQ ID NO: 43445 - DNA, 55 bp, Emericella nidulans
gttctcgagacgagcgatcgctcatgaaacagatatactgacaattttcacatcg

SEQ ID NO: 43446 - DNA, 41 bp, Emericella nidulans
gaattcactgcggccgccatgctctgtcaaggcgaggacaa

SEQ ID NO: 43447 - DNA, 42 bp, Emericella nidulans
gttctcgagacgagcgatcgcttagtagcggtagtggtcagc

SEQ ID NO: 43448 - DNA, 41 bp, Emericella nidulans
gaattcactgcggccgccatgaagaccgccgtcaaaaccac

SEQ ID NO: 43449 - DNA, 46 bp, Emericella nidulans
gttctcgagacgagcgatcgcttacctggaagacacaactccgttc

SEQ ID NO: 43450 - DNA, 46 bp, Emericella nidulans
gaattcactgcggccgccatggaattaccttccgcagcccataccc

SEQ ID NO: 43451 - DNA, 45 bp, Emericella nidulans
gttctcgagacgagcgatcgctcaatcctcatggcctgcattcac

SEQ ID NO: 43452 - DNA, 40 bp, Emericella nidulans
gaattcactgcggccgccatggcaaccatcaaggccatcg

SEQ ID NO: 43453 - DNA, 41 bp, Emericella nidulans
gttctcgagacgagcgatcgctcatcctgtcttgcgggttc

SEQ ID NO: 43454 - DNA, 52 bp, Emericella nidulans
gaattcactgcggccgccatggatgaggcacttcgtgatctcgacgagaaag

SEQ ID NO: 43455 - DNA, 51 bp, Emericella nidulans
gttctcgagacgagcgatcgcctaatcttcagtaagatccggcacagaccc

SEQ ID NO: 43456 - DNA, 50 bp, Emericella nidulans
gaattcactgcggccgccatgactgacttcgcagagaaaaaccgccaggt

SEQ ID NO: 43457 - DNA, 46 bp, Emericella nidulans
gttctcgagacgagcgatcgctcacttctgccctcgagcaatgaaa

SEQ ID NO: 43458 - DNA, 43 bp, Emericella nidulans
gaattcactgcggccgccatgttcggctttggagggctccttg

SEQ ID NO: 43459 - DNA, 44 bp, Emericella nidulans
gttctcgagacgagcgatcgcctactcgcccacaggcattgtcc

SEQ ID NO: 43460 - DNA, 41 bp, Emericella nidulans
gaattcactgcggccgccatggacgtcgtgtccgccaaagg

SEQ ID NO: 43461 - DNA, 46 bp, Emericella nidulans
gttctcgagacgagcgatcgctcacctcttgctgcctctcgacgaa

SEQ ID NO: 43462 - DNA, 57 bp, Emericella nidulans
gaattcactgcggccgccatggagatatctgaaaaagaatcaaaccatcctagtcct

SEQ ID NO: 43463 - DNA, 52 bp, Emericella nidulans
gttctcgagacgagcgatcgcctaaaggtaattgatcaggcctccagcggta

SEQ ID NO: 43464 - DNA, 44 bp, Emericella nidulans
gaattcactgcggccgccatgggtctccgtgtcaaagcccttgc

SEQ ID NO: 43465 - DNA, 49 bp, Emericella nidulans
gttctcgagacgagcgatcgcttataggcccatcggcagagatggctgt

SEQ ID NO: 43466 - DNA, 50 bp, Emericella nidulans
gaattcactgcggccgccatgattactgctgctcgcctgattgcacacaa

SEQ ID NO: 43467 - DNA, 45 bp, Emericella nidulans
gttctcgagacgagcgatcgctcatagcaccagggtggcatcagc

SEQ ID NO: 43468 - DNA, 53 bp, Emericella nidulans
gaattcactgcggccgccatgggtccactgcaaaacagcatgcagtatgaaaa

SEQ ID NO: 43469 - DNA, 57 bp, Emericella nidulans
gttctcgagacgagcgatcgctcagttcttaagatacaaagtctgcaagttacacca

SEQ ID NO: 43470 - DNA, 57 bp, Emericella nidulans
gaattcactgcggccgccatggcttcctatctcaaccctctcgttatcttatctttg

SEQ ID NO: 43471 - DNA, 45 bp, Emericella nidulans
gttctcgagacgagcgatcgctcacaccgagcagccccagtgagt

SEQ ID NO: 43472 - DNA, 39 bp, Emericella nidulans
gaattcactgcggccgccatgcgcgcccgcactctcctc

SEQ ID NO: 43473 - DNA, 50 bp, Emericella nidulans
gttctcgagacgagcgatcgctcagttccaaacagacccaaccttactca

SEQ ID NO: 43474 - DNA, 46 bp, Emericella nidulans
gaattcactgcggccgccatggtgaaacaatcgcttcctgcggttt

SEQ ID NO: 43475 - DNA, 48 bp, Emericella nidulans
gttctcgagacgagcgatcgctcaaagctcgtcatgctcaggcttttc

SEQ ID NO: 43476 - DNA, 42 bp, Emericella nidulans
gaattcactgcggccgccatgtctaccgagatgtcgagcaat

SEQ ID NO: 43477 - DNA, 42 bp, Emericella nidulans
gttctcgagacgagcgatcgcttaatccttccaaaaccaccc

SEQ ID NO: 43478 - DNA, 42 bp, Emericella nidulans
gaattcactgcggccgccatgtctcccgcacacggtcactgc

SEQ ID NO: 43479 - DNA, 41 bp, Emericella nidulans
gttctcgagacgagcgatcgcctaacgcgggggttggttcg

SEQ ID NO: 43480 - DNA, 43 bp, Emericella nidulans
gaattcactgcggccgccatgattcgcgaacaatcggcagacg

SEQ ID NO: 43481 - DNA, 49 bp, Emericella nidulans
gttctcgagacgagcgatcgctcagttctcctcgtcatctgaatttcca

SEQ ID NO: 43482 - DNA, 46 bp, Emericella nidulans
gaattcactgcggccgccatgaaggcttttgccgaagagaacgagt

SEQ ID NO: 43483 - DNA, 41 bp, Emericella nidulans
gttctcgagacgagcgatcgcctagcgccggggaacgggag

SEQ ID NO: 43484 - DNA, 45 bp, Emericella nidulans
gaattcactgcggccgccatgttcaagcccgaactccgaaagcaa

SEQ ID NO: 43485 - DNA, 44 bp, Emericella nidulans
gttctcgagacgagcgatcgctcatgcctcaggcagcatatcgt

SEQ ID NO: 43486 - DNA, 45 bp, Emericella nidulans
gaattcactgcggccgccatgcacgtagcccctagttcgtactgc

SEQ ID NO: 43487 - DNA, 50 bp, Emericella nidulans
gttctcgagacgagcgatcgcttactcatcagttaagcgaagatgatacg

SEQ ID NO: 43488 - DNA, 42 bp, Emericella nidulans
gaattcactgcggccgccatgacgtccatcggcaccggctac

SEQ ID NO: 43489 - DNA, 45 bp, Emericella nidulans
gttctcgagacgagcgatcgctcactcttccatcctctcgccctc

SEQ ID NO: 43490 - DNA, 52 bp, Emericella nidulans
gaattcactgcggccgccatgcctcaactgaacggaaaagaagttggcccta

SEQ ID NO: 43491 - DNA, 45 bp, Emericella nidulans
gttctcgagacgagcgatcgcctatgtatgggtcggcaccccctc

SEQ ID NO: 43492 - DNA, 44 bp, Emericella nidulans
gaattcactgcggccgccatggcctaccgcaagaacaactacgc

SEQ ID NO: 43493 - DNA, 45 bp, Emericella nidulans
gttctcgagacgagcgatcgcctattggctccccttctccctctt

SEQ ID NO: 43494 - DNA, 49 bp, Emericella nidulans
gaattcactgcggccgccatgtctcagttcaaagctcaggctgagaaga

SEQ ID NO: 43495 - DNA, 51 bp, Emericella nidulans
gttctcgagacgagcgatcgcttatcttggaatcagctcgacttgcgtgaa

SEQ ID NO: 43496 - DNA, 46 bp, Emericella nidulans
gaattcactgcggccgccatggcgtcggctactgagtcttcccctc

SEQ ID NO: 43497 - DNA, 52 bp, Emericella nidulans
gttctcgagacgagcgatcgcctattcaacgccagcatagagatcaacaaca

SEQ ID NO: 43498 - DNA, 43 bp, Emericella nidulans
gaattcactgcggccgccatgaaatatgcgctgtccgggaaac

SEQ ID NO: 43499 - DNA, 42 bp, Emericella nidulans
gttctcgagacgagcgatcgcttaaccgcgaagcgggagaat

SEQ ID NO: 43500 - DNA, 45 bp, Emericella nidulans
gaattcactgcggccgccatgctttcgaaaacgctcattgtcctg

SEQ ID NO: 43501 - DNA, 49 bp, Emericella nidulans
gttctcgagacgagcgatcgcctagtaataatgctctcccttcgtcaga

SEQ ID NO: 43502 - DNA, 41 bp, Emericella nidulans
gaattcactgcggccgccatgacgctccccgcactcgtcct

SEQ ID NO: 43503 - DNA, 47 bp, Emericella nidulans
gttctcgagacgagcgatcgcttagggttgtggtccgttggaaagtg

SEQ ID NO: 43504 - DNA, 39 bp, Emericella nidulans
gaattcactgcggccgccatgccctccatccgcaccctc

SEQ ID NO: 43505 - DNA, 46 bp, Emericella nidulans
gttctcgagacgagcgatcgcctagaggtcgtccttggtcacatgc

SEQ ID NO: 43506 - DNA, 55 bp, Emericella nidulans
gaattcactgcggccgccatgtctcaactcaccaaagactcatctattctcatca

SEQ ID NO: 43507 - DNA, 50 bp, Emericella nidulans
gttctcgagacgagcgatcgcctaaattatctcctccccaacccttgtcc

SEQ ID NO: 43508 - DNA, 45 bp, Emericella nidulans
gaattcactgcggccgccatgggttccaatcggggcgaagttgac

SEQ ID NO: 43509 - DNA, 49 bp, Emericella nidulans
gttctcgagacgagcgatcgcttacccatgcaccttcctcgaagaacca

SEQ ID NO: 43510 - DNA, 45 bp, Emericella nidulans
gaattcactgcggccgccatgcccgacatacccagtgacgaagaa

SEQ ID NO: 43511 - DNA, 47 bp, Emericella nidulans
gttctcgagacgagcgatcgcctatgattccccgtctaccccgtctc

SEQ ID NO: 43512 - DNA, 44 bp, Emericella nidulans
gaattcactgcggccgccatgccaacagagagcccagccgcctc

SEQ ID NO: 43513 - DNA, 52 bp, Emericella nidulans
gttctcgagacgagcgatcgcttatagaggttttgagttgcggcttatgaca

SEQ ID NO: 43514 - DNA, 47 bp, Emericella nidulans
gaattcactgcggccgccatgacgatatgctccttgctcgtgattgg

SEQ ID NO: 43515 - DNA, 53 bp, Emericella nidulans
gttctcgagacgagcgatcgcttaatagaccttcttcttctcgtccatgctca

SEQ ID NO: 43516 - DNA, 43 bp, Emericella nidulans
gaattcactgcggccgccatgggtgcggacgagcctaatgctt

SEQ ID NO: 43517 - DNA, 47 bp, Emericella nidulans
gttctcgagacgagcgatcgcttaatgtcgctggaaagagcgactgg

SEQ ID NO: 43518 - DNA, 48 bp, Emericella nidulans
gaattcactgcggccgccatggatatcggaagaatttttgcccccaac

SEQ ID NO: 43519 - DNA, 54 bp, Emericella nidulans
gttctcgagacgagcgatcgcctataaacctccctcgtacccacgtataacctt

SEQ ID NO: 43520 - DNA, 39 bp, Emericella nidulans
gaattcactgcggccgccatggccttcaagaacgccacc

SEQ ID NO: 43521 - DNA, 44 bp, Emericella nidulans
gttctcgagacgagcgatcgcttatttcttatgcctgtcagcct

SEQ ID NO: 43522 - DNA, 43 bp, Emericella nidulans
gaattcactgcggccgccatggctgcagttccgaatgatgacg

SEQ ID NO: 43523 - DNA, 54 bp, Emericella nidulans
gttctcgagacgagcgatcgcctaaacggtaaactttgtcttgtttataggagc

SEQ ID NO: 43524 - DNA, 40 bp, Emericella nidulans
gaattcactgcggccgccatgtccaagctccaagccgaga

SEQ ID NO: 43525 - DNA, 43 bp, Emericella nidulans
gttctcgagacgagcgatcgctcaaatcgttgtcggactgaaa

SEQ ID NO: 43526 - DNA, 44 bp, Emericella nidulans
gaattcactgcggccgccatggctccatcagaaacctccatcct

SEQ ID NO: 43527 - DNA, 45 bp, Emericella nidulans
gttctcgagacgagcgatcgcttaaacagcgctcttacgggagca

SEQ ID NO: 43528 - DNA, 45 bp, Emericella nidulans
gaattcactgcggccgccatgttgataggaccgggcacaggtgtt

SEQ ID NO: 43529 - DNA, 55 bp, Emericella nidulans
gttctcgagacgagcgatcgcctaccatgtctcttgtttataccgtcctgtcttt

SEQ ID NO: 43530 - DNA, 39 bp, Emericella nidulans
gaattcactgcggccgccatggcggcgtgcgccatcacc

SEQ ID NO: 43531 - DNA, 50 bp, Emericella nidulans
gttctcgagacgagcgatcgcctaaaaccgcgtataactccctcgttttg

SEQ ID NO: 43532 - DNA, 44 bp, Emericella nidulans
gaattcactgcggccgccatgcatctcgatcacggcaaggagta

SEQ ID NO: 43533 - DNA, 40 bp, Emericella nidulans
gttctcgagacgagcgatcgcctatgcaaccccggcctcc

SEQ ID NO: 43534 - DNA, 45 bp, Emericella nidulans
gaattcactgcggccgccatggctagtggtctgaaggttgctacg

SEQ ID NO: 43535 - DNA, 47 bp, Emericella nidulans
gttctcgagacgagcgatcgcctatttctggggtgcagagaagttca

SEQ ID NO: 43536 - DNA, 48 bp, Emericella nidulans
gaattcactgcggccgccatgggctttgatgaacatgagaccacagtc

SEQ ID NO: 43537 - DNA, 54 bp, Emericella nidulans
gttctcgagacgagcgatcgcttagttctttccccacggtatctttaagttgag

SEQ ID NO: 43538 - DNA, 48 bp, Emericella nidulans
gaattcactgcggccgccatggataacgcaaagatcgtgctcatcaca

SEQ ID NO: 43539 - DNA, 45 bp, Emericella nidulans
gttctcgagacgagcgatcgctcaccactcctgcaccccatcctt

SEQ ID NO: 43540 - DNA, 41 bp, Emericella nidulans
gaattcactgcggccgccatgggctttggaggcgttgtcct

SEQ ID NO: 43541 - DNA, 45 bp, Emericella nidulans
gttctcgagacgagcgatcgctcacactccaatgattgaaactgc

SEQ ID NO: 43542 - DNA, 42 bp, Emericella nidulans
gaattcactgcggccgccatgtctgacgtcgctgagaccaag

SEQ ID NO: 43543 - DNA, 49 bp, Emericella nidulans
gttctcgagacgagcgatcgcctactgtttgaaaagcttctcattctcc

SEQ ID NO: 43544 - DNA, 50 bp, Emericella nidulans
gaattcactgcggccgccatggcctttagactcgttcttctgcttgttgc

SEQ ID NO: 43545 - DNA, 47 bp, Emericella nidulans
gttctcgagacgagcgatcgcctagaccccaaagatgcgtacgaagg

SEQ ID NO: 43546 - DNA, 49 bp, Emericella nidulans
gaattcactgcggccgccatgtcatcggttgaaaacatcctcgttcttg

SEQ ID NO: 43547 - DNA, 46 bp, Emericella nidulans
gttctcgagacgagcgatcgcttagaccaagttctctcgcgcccac

SEQ ID NO: 43548 - DNA, 50 bp, Emericella nidulans
gaattcactgcggccgccatggattacggaccaagcttcacggaatcctc

SEQ ID NO: 43549 - DNA, 48 bp, Emericella nidulans
gttctcgagacgagcgatcgctcaagcaacagtttcaacctgctccag

SEQ ID NO: 43550 - DNA, 45 bp, Emericella nidulans
gaattcactgcggccgccatgttcttggagcggacaccaaggtcc

SEQ ID NO: 43551 - DNA, 52 bp, Emericella nidulans
gttctcgagacgagcgatcgcctactgtggtgcgtcgtagacatcatacttg

SEQ ID NO: 43552 - DNA, 39 bp, Emericella nidulans
gaattcactgcggccgccatgcggacgaggctctcaaac

SEQ ID NO: 43553 - DNA, 41 bp, Emericella nidulans
gttctcgagacgagcgatcgcttaggcatcgagacgagtgt

SEQ ID NO: 43554 - DNA, 50 bp, Emericella nidulans
gaattcactgcggccgccatgtttgttactcgctttctgcttcgattgac

SEQ ID NO: 43555 - DNA, 45 bp, Emericella nidulans
gttctcgagacgagcgatcgctcactcagagcctcccggaacatc

SEQ ID NO: 43556 - DNA, 50 bp, Emericella nidulans
gaattcactgcggccgccatgcgtgaaacaggttttgtcactaatagacg

SEQ ID NO: 43557 - DNA, 48 bp, Emericella nidulans
gttctcgagacgagcgatcgcctagaattcggaaaagagaggatttgc

SEQ ID NO: 43558 - DNA, 39 bp, Emericella nidulans
gaattcactgcggccgccatgggggcccggccgcaacta

SEQ ID NO: 43559 - DNA, 43 bp, Emericella nidulans
gttctcgagacgagcgatcgctcatgcacccgcttcccttctc

SEQ ID NO: 43560 - DNA, 44 bp, Emericella nidulans
gaattcactgcggccgccatgaggctaacttggcttctgactct

SEQ ID NO: 43561 - DNA, 44 bp, Emericella nidulans
gttctcgagacgagcgatcgcttaccagacaggataatcgatgc

SEQ ID NO: 43562 - DNA, 49 bp, Emericella nidulans
gaattcactgcggccgccatgaaagacccgatcggaattcaagaagagg

SEQ ID NO: 43563 - DNA, 51 bp, Emericella nidulans
gttctcgagacgagcgatcgcctagttgtcactctccgtatccgactcctg

SEQ ID NO: 43564 - DNA, 52 bp, Emericella nidulans
gaattcactgcggccgccatgaagctcttcaacacactctcgcttctactcg

SEQ ID NO: 43565 - DNA, 45 bp, Emericella nidulans
gttctcgagacgagcgatcgctcacgcagtgggttcggtcacaag

SEQ ID NO: 43566 - DNA, 48 bp, Emericella nidulans
gaattcactgcggccgccatgtcgctctttaaatttgccgcttttgtc

SEQ ID NO: 43567 - DNA, 44 bp, Emericella nidulans
gttctcgagacgagcgatcgctcagctcatcagtcgcccaagtg

SEQ ID NO: 43568 - DNA, 51 bp, Emericella nidulans
gaattcactgcggccgccatgacatctaatctcggcgccgaatacctagcc

SEQ ID NO: 43569 - DNA, 43 bp, Emericella nidulans
gttctcgagacgagcgatcgcttaggacggcgaggcggttgag

SEQ ID NO: 43570 - DNA, 51 bp, Emericella nidulans
gaattcactgcggccgccatgcctgcatcttggtcgttcgagatctacgtc

SEQ ID NO: 43571 - DNA, 49 bp, Emericella nidulans
gttctcgagacgagcgatcgcctaggttgagtcgccgatagtttcctca

SEQ ID NO: 43572 - DNA, 43 bp, Emericella nidulans
gaattcactgcggccgccatgcaattcggtatatcgagtccac

SEQ ID NO: 43573 - DNA, 46 bp, Emericella nidulans
gttctcgagacgagcgatcgcttagatagcgacattcttcatctcg

SEQ ID NO: 43574 - DNA, 45 bp, Emericella nidulans
gaattcactgcggccgccatgccgtcgctccgagccatcgttttt

SEQ ID NO: 43575 - DNA, 50 bp, Emericella nidulans
gttctcgagacgagcgatcgcttagagactatcgccgtggttatccttga

SEQ ID NO: 43576 - DNA, 48 bp, Emericella nidulans
gaattcactgcggccgccatgtttgatgtcgggtcctatgtccggttt

SEQ ID NO: 43577 - DNA, 41 bp, Emericella nidulans
gttctcgagacgagcgatcgctcaggcggcagccttcttcc

SEQ ID NO: 43578 - DNA, 45 bp, Emericella nidulans
gaattcactgcggccgccatgccgtaccgagcgccagaactcttc

SEQ ID NO: 43579 - DNA, 43 bp, Emericella nidulans
gttctcgagacgagcgatcgctcaacccaccacgtcgtcatcc

SEQ ID NO: 43580 - DNA, 46 bp, Emericella nidulans
gaattcactgcggccgccatgtcttccatcaatcgcggagagagtg

SEQ ID NO: 43581 - DNA, 53 bp, Emericella nidulans
gttctcgagacgagcgatcgcttaggaaatgaaatggaaggtgaaagcccatc

SEQ ID NO: 43582 - DNA, 45 bp, Emericella nidulans
gaattcactgcggccgccatggcctcgacataccctgaccagtcc

SEQ ID NO: 43583 - DNA, 48 bp, Emericella nidulans
gttctcgagacgagcgatcgctcaattcttgagtttccgtgcaatcca

SEQ ID NO: 43584 - DNA, 42 bp, Emericella nidulans
gaattcactgcggccgccatgaggggaagcccgatgggtgat

SEQ ID NO: 43585 - DNA, 44 bp, Emericella nidulans
gttctcgagacgagcgatcgctcaagacccccagtttcggcata

SEQ ID NO: 43586 - DNA, 46 bp, Emericella nidulans
gaattcactgcggccgccatgcacctcatccctgtcggacttttgg

SEQ ID NO: 43587 - DNA, 49 bp, Emericella nidulans
gttctcgagacgagcgatcgctcatgtttccgtcggggagatcatcctt

SEQ ID NO: 43588 - DNA, 57 bp, Emericella nidulans
gaattcactgcggccgccatgacgttactcaaggttgtgtctagtgatgcccttgct

SEQ ID NO: 43589 - DNA, 47 bp, Emericella nidulans
gttctcgagacgagcgatcgctcactcctcgtagacggtttgttcgt

SEQ ID NO: 43590 - DNA, 51 bp, Emericella nidulans
gaattcactgcggccgccatggaaaagttggacctcaagatggaggagctg

SEQ ID NO: 43591 - DNA, 54 bp, Emericella nidulans
gttctcgagacgagcgatcgcttaggtagagaagagatcgaggagaggaactga

SEQ ID NO: 43592 - DNA, 48 bp, Emericella nidulans
gaattcactgcggccgccatgtgtgttgcccatataggcaccttcaaa

SEQ ID NO: 43593 - DNA, 45 bp, Emericella nidulans
gttctcgagacgagcgatcgctcagtggaaggtcatcgccgacaa

SEQ ID NO: 43594 - DNA, 50 bp, Emericella nidulans
gaattcactgcggccgccatgggaattatcggtcctcttgtagacggtgc

SEQ ID NO: 43595 - DNA, 42 bp, Emericella nidulans
gttctcgagacgagcgatcgctcaagcaacctcgccctttgc

SEQ ID NO: 43596 - DNA, 49 bp, Emericella nidulans
gaattcactgcggccgccatgaaagctgtcgtcggagaagaagcccttt

SEQ ID NO: 43597 - DNA, 57 bp, Emericella nidulans
gttctcgagacgagcgatcgcctaagtctcgatcaaatccgcagtttgagactgtcc

SEQ ID NO: 43598 - DNA, 45 bp, Emericella nidulans
gaattcactgcggccgccatggatgcaagcattgggacttacctt

SEQ ID NO: 43599 - DNA, 51 bp, Emericella nidulans
gttctcgagacgagcgatcgctcatagacaatctataacaactgcatcagc

SEQ ID NO: 43600 - DNA, 45 bp, Emericella nidulans
gaattcactgcggccgccatggcctcctgggacgtcgctaatatg

SEQ ID NO: 43601 - DNA, 48 bp, Emericella nidulans
gttctcgagacgagcgatcgctcacagtatcgtcgtgactccatcacc

SEQ ID NO: 43602 - DNA, 40 bp, Emericella nidulans
gaattcactgcggccgccatggaggtccggcgacgggtgt

SEQ ID NO: 43603 - DNA, 51 bp, Emericella nidulans
gttctcgagacgagcgatcgcctataagctttcctgttccaaccccgctgt

SEQ ID NO: 43604 - DNA, 41 bp, Emericella nidulans
gaattcactgcggccgccatgcatcggtgccatggagccac

SEQ ID NO: 43605 - DNA, 49 bp, Emericella nidulans
gttctcgagacgagcgatcgcctagacatcgatttccttcccatcaagc

SEQ ID NO: 43606 - DNA, 40 bp, Emericella nidulans
gaattcactgcggccgccatggcagttcgtggagtgttcg

SEQ ID NO: 43607 - DNA, 44 bp, Emericella nidulans
gttctcgagacgagcgatcgcctaaccttcaagtgcagtaggga

SEQ ID NO: 43608 - DNA, 46 bp, Emericella nidulans
gaattcactgcggccgccatgttgactgaccaggcagactggcata

SEQ ID NO: 43609 - DNA, 49 bp, Emericella nidulans
gttctcgagacgagcgatcgcttaggcctcgagcttagggttgatcttg

SEQ ID NO: 43610 - DNA, 50 bp, Emericella nidulans
gaattcactgcggccgccatgcgtctcgtcaaaaataagattgaatatgg

SEQ ID NO: 43611 - DNA, 47 bp, Emericella nidulans
gttctcgagacgagcgatcgctcattcgctatcttcctccaaatcat

SEQ ID NO: 43612 - DNA, 45 bp, Emericella nidulans
gaattcactgcggccgccatgctcagcaagggccttcccccgaac

SEQ ID NO: 43613 - DNA, 57 bp, Emericella nidulans
gttctcgagacgagcgatcgcctattttgtgtttatatcgttgtcagtgagggactg

SEQ ID NO: 43614 - DNA, 53 bp, Emericella nidulans
gaattcactgcggccgccatgcttatctttggtagtgacatgatcacaagtcg

SEQ ID NO: 43615 - DNA, 52 bp, Emericella nidulans
gttctcgagacgagcgatcgcctaaaagtccttcttaaacaatgtcaaccgt

SEQ ID NO: 43616 - DNA, 45 bp, Emericella nidulans
gaattcactgcggccgccatggcttgtggactgatctgcgcaccc

SEQ ID NO: 43617 - DNA, 47 bp, Emericella nidulans
gttctcgagacgagcgatcgctcagtgtttcccattgacagcatcac

SEQ ID NO: 43618 - DNA, 46 bp, Emericella nidulans
gaattcactgcggccgccatgctcaacgcgggttccacatttggtc

SEQ ID NO: 43619 - DNA, 49 bp, Emericella nidulans
gttctcgagacgagcgatcgcttaagccctaacggcaagatttactccc

SEQ ID NO: 43620 - DNA, 45 bp, Emericella nidulans
gaattcactgcggccgccatgttcatcggcgcaaaggtttacgat

SEQ ID NO: 43621 - DNA, 57 bp, Emericella nidulans
gttctcgagacgagcgatcgcctaattagatgttggaaggatggttatcggaataaa

SEQ ID NO: 43622 - DNA, 40 bp, Emericella nidulans
gaattcactgcggccgccatgtttagaaacgccattcgag

SEQ ID NO: 43623 - DNA, 42 bp, Emericella nidulans
gttctcgagacgagcgatcgcttatagctttgctgcgtggtc

SEQ ID NO: 43624 - DNA, 48 bp, Emericella nidulans
gaattcactgcggccgccatgagggacccgacagtagatatggagcaa

SEQ ID NO: 43625 - DNA, 53 bp, Emericella nidulans
gttctcgagacgagcgatcgctcatgtggaatgttgatactcgtattgtctgc

SEQ ID NO: 43626 - DNA, 45 bp, Emericella nidulans
gaattcactgcggccgccatggtcggtttcgatatgcacgggttg

SEQ ID NO: 43627 - DNA, 49 bp, Emericella nidulans
gttctcgagacgagcgatcgcctatgcaacctttcctaatgcagcagtg

SEQ ID NO: 43628 - DNA, 42 bp, Emericella nidulans
gaattcactgcggccgccatggccccctccttcgtgagcatc

SEQ ID NO: 43629 - DNA, 47 bp, Emericella nidulans
gttctcgagacgagcgatcgcttaaaggtgggcaacgtcattcaaga

SEQ ID NO: 43630 - DNA, 45 bp, Emericella nidulans
gaattcactgcggccgccatgaactccattgcccgtggacagaag

SEQ ID NO: 43631 - DNA, 46 bp, Emericella nidulans
gttctcgagacgagcgatcgcttacgttgggtcattcgccaagttc

SEQ ID NO: 43632 - DNA, 39 bp, Emericella nidulans
gaattcactgcggccgccatgctgcacaagaagcgcacc

SEQ ID NO: 43633 - DNA, 47 bp, Emericella nidulans
gttctcgagacgagcgatcgctcacaagttagtgatgtactctttca

SEQ ID NO: 43634 - DNA, 48 bp, Emericella nidulans
gaattcactgcggccgccatgtctagtctgttgatcgtgctgggcctc

SEQ ID NO: 43635 - DNA, 42 bp, Emericella nidulans
gttctcgagacgagcgatcgctcagtccgtgcttcccgttcg

SEQ ID NO: 43636 - DNA, 42 bp, Emericella nidulans
gaattcactgcggccgccatggcaaaccgcaaaggccgcacc

SEQ ID NO: 43637 - DNA, 52 bp, Emericella nidulans
gttctcgagacgagcgatcgcttaaccaatcaaagactgagactcaggcaag

SEQ ID NO: 43638 - DNA, 43 bp, Emericella nidulans
gaattcactgcggccgccatggcaaagcgccttgagggcaaga

SEQ ID NO: 43639 - DNA, 53 bp, Emericella nidulans
gttctcgagacgagcgatcgcttattgaggcttcttgtacagatgaccgggag

SEQ ID NO: 43640 - DNA, 46 bp, Emericella nidulans
gaattcactgcggccgccatggcccttggcaacctaacagccgaag

SEQ ID NO: 43641 - DNA, 48 bp, Emericella nidulans
gttctcgagacgagcgatcgctcagatttccagcatgtccagcccagt

SEQ ID NO: 43642 - DNA, 51 bp, Emericella nidulans
gaattcactgcggccgccatgagatccgattacgagctaacaccacctaga

SEQ ID NO: 43643 - DNA, 46 bp, Emericella nidulans
gttctcgagacgagcgatcgcctattggaaggcattccgaacctcc

SEQ ID NO: 43644 - DNA, 49 bp, Emericella nidulans
gaattcactgcggccgccatgtcccgaataacctttaatgctcccgaat

SEQ ID NO: 43645 - DNA, 44 bp, Emericella nidulans
gttctcgagacgagcgatcgctcatcgtgaatgccaaaggctcc

SEQ ID NO: 43646 - DNA, 46 bp, Emericella nidulans
gaattcactgcggccgccatgggtgaagacaaagaaacaaatatcc

SEQ ID NO: 43647 - DNA, 45 bp, Emericella nidulans
gttctcgagacgagcgatcgcctagatgttgattagcctcagagc

SEQ ID NO: 43648 - DNA, 47 bp, Emericella nidulans
gaattcactgcggccgccatggagcaacaacctctcaactcgcaacc

SEQ ID NO: 43649 - DNA, 45 bp, Emericella nidulans
gttctcgagacgagcgatcgcctaacggaacagcctccccatcaa

SEQ ID NO: 43650 - DNA, 48 bp, Emericella nidulans
gaattcactgcggccgccatgctggaaatccttcgtgacttcctggac

SEQ ID NO: 43651 - DNA, 48 bp, Emericella nidulans
gttctcgagacgagcgatcgctcaggaatcgctctgggtatgagaaga

SEQ ID NO: 43652 - DNA, 51 bp, Emericella nidulans
gaattcactgcggccgccatggcttcagtatacaaggcagtgtccaagaga

SEQ ID NO: 43653 - DNA, 46 bp, Emericella nidulans
gttctcgagacgagcgatcgcctatggaccgtccttggggttgtgc

SEQ ID NO: 43654 - DNA, 47 bp, Emericella nidulans
gaattcactgcggccgccatgcaggcacatagctacacgaatgccac

SEQ ID NO: 43655 - DNA, 40 bp, Emericella nidulans
gttctcgagacgagcgatcgctcacatccgccccgcgttc

SEQ ID NO: 43656 - DNA, 43 bp, Emericella nidulans
gaattcactgcggccgccatggccgtagcacttgcctccatcg

SEQ ID NO: 43657 - DNA, 43 bp, Emericella nidulans
gttctcgagacgagcgatcgctcaccccaggtgttccgtgagc

SEQ ID NO: 43658 - DNA, 46 bp, Emericella nidulans
gaattcactgcggccgccatgaatcccaatcagccgaagccgactc

SEQ ID NO: 43659 - DNA, 45 bp, Emericella nidulans
gttctcgagacgagcgatcgcttactgccccactggctgcaaaag

SEQ ID NO: 43660 - DNA, 44 bp, Emericella nidulans
gaattcactgcggccgccatgtcgcagcctacggattctggtgc

SEQ ID NO: 43661 - DNA, 55 bp, Emericella nidulans
gttctcgagacgagcgatcgcctaagggtcctcatataggtgaccccttgaccgt

SEQ ID NO: 43662 - DNA, 46 bp, Emericella nidulans
gaattcactgcggccgccatggccactcccttcctcgtctcctacg

SEQ ID NO: 43663 - DNA, 51 bp, Emericella nidulans
gttctcgagacgagcgatcgcctacaactgctcctgcttcatagccgcaac

SEQ ID NO: 43664 - DNA, 46 bp, Emericella nidulans
gaattcactgcggccgccatgggcgaggagcgaacgtacactgttt

SEQ ID NO: 43665 - DNA, 48 bp, Emericella nidulans
gttctcgagacgagcgatcgcttacttctcattctggccgcgcggatt

SEQ ID NO: 43666 - DNA, 45 bp, Emericella nidulans
gaattcactgcggccgccatggccgcagtcctccaaagccagaag

SEQ ID NO: 43667 - DNA, 51 bp, Emericella nidulans
gttctcgagacgagcgatcgcctatttcctcctcctctcagcatagtctcg

SEQ ID NO: 43668 - DNA, 45 bp, Emericella nidulans
gaattcactgcggccgccatgctgttccacagcgttcccaaacta

SEQ ID NO: 43669 - DNA, 40 bp, Emericella nidulans
gttctcgagacgagcgatcgctcacagccacgaaggaacc

SEQ ID NO: 43670 - DNA, 42 bp, Emericella nidulans
gaattcactgcggccgccatgcatggcatcctcgctctgtcg

SEQ ID NO: 43671 - DNA, 52 bp, Emericella nidulans
gttctcgagacgagcgatcgcctaagtgtcaattgctgcaggatcatagtcg

SEQ ID NO: 43672 - DNA, 46 bp, Emericella nidulans
gaattcactgcggccgccatgccaatcaatcaaccctcgaaccaga

SEQ ID NO: 43673 - DNA, 52 bp, Emericella nidulans
gttctcgagacgagcgatcgcttactggtagttcacctcccattcatcgcta

SEQ ID NO: 43674 - DNA, 44 bp, Emericella nidulans
gaattcactgcggccgccatggtttcccagacggctcttattgc

SEQ ID NO: 43675 - DNA, 42 bp, Emericella nidulans
gttctcgagacgagcgatcgctcagtggcagccgggagatac

SEQ ID NO: 43676 - DNA, 41 bp, Emericella nidulans
gaattcactgcggccgccatgaacaccacgcgccacaggct

SEQ ID NO: 43677 - DNA, 45 bp, Emericella nidulans
gttctcgagacgagcgatcgcttagagggccgcagtcgaggcagt

SEQ ID NO: 43678 - DNA, 42 bp, Emericella nidulans
gaattcactgcggccgccatgctgaacgcgttcatccgcatc

SEQ ID NO: 43679 - DNA, 51 bp, Emericella nidulans
gttctcgagacgagcgatcgcctagtgagcagccaacatcttcttgatctc

SEQ ID NO: 43680 - DNA, 53 bp, Emericella nidulans
gaattcactgcggccgccatgatttacctactagaagatgccctagaactctg

SEQ ID NO: 43681 - DNA, 39 bp, Emericella nidulans
gttctcgagacgagcgatcgcttaggaggcggccgaaac

SEQ ID NO: 43682 - DNA, 39 bp, Emericella nidulans
gaattcactgcggccgccatgctgcatgccctcctccac

SEQ ID NO: 43683 - DNA, 41 bp, Emericella nidulans
gttctcgagacgagcgatcgctcaagactccggtcccgttg

SEQ ID NO: 43684 - DNA, 47 bp, Emericella nidulans
gaattcactgcggccgccatgttttcccatatcaaacaagagcatga

SEQ ID NO: 43685 - DNA, 46 bp, Emericella nidulans
gttctcgagacgagcgatcgcctagaccacgttctcgaattgcgta

SEQ ID NO: 43686 - DNA, 42 bp, Emericella nidulans
gaattcactgcggccgccatggaaacggacaacgtcggcctc

SEQ ID NO: 43687 - DNA, 44 bp, Emericella nidulans
gttctcgagacgagcgatcgctcaccagcggtcaaccatcctct

SEQ ID NO: 43688 - DNA, 50 bp, Emericella nidulans
gaattcactgcggccgccatggtcattcctgtcaagctcgcagcagaagc

SEQ ID NO: 43689 - DNA, 44 bp, Emericella nidulans
gttctcgagacgagcgatcgctcactcgtcgccattcgaaccct

SEQ ID NO: 43690 - DNA, 40 bp, Emericella nidulans
gaattcactgcggccgccatgtatgccgtctatttccctc

SEQ ID NO: 43691 - DNA, 42 bp, Emericella nidulans
gttctcgagacgagcgatcgctcaaacatcattaaccggctc

SEQ ID NO: 43692 - DNA, 45 bp, Emericella nidulans
gaattcactgcggccgccatgcttcgagccgtcctcctccctact

SEQ ID NO: 43693 - DNA, 46 bp, Emericella nidulans
gttctcgagacgagcgatcgcctagaaggttcccaccctcgccttc

SEQ ID NO: 43694 - DNA, 41 bp, Emericella nidulans
gaattcactgcggccgccatggcctacgacccgcgattagc

SEQ ID NO: 43695 - DNA, 48 bp, Emericella nidulans
gttctcgagacgagcgatcgcctacaaccaagccaaagtccataatgc

SEQ ID NO: 43696 - DNA, 45 bp, Emericella nidulans
gaattcactgcggccgccatgtgcttggatggactccctcgtgct

SEQ ID NO: 43697 - DNA, 46 bp, Emericella nidulans
gttctcgagacgagcgatcgctcaacgactgcagccagaacgcaac

SEQ ID NO: 43698 - DNA, 52 bp, Emericella nidulans
gaattcactgcggccgccatgttgaaggatctgaccatatccgacattcatt

SEQ ID NO: 43699 - DNA, 48 bp, Emericella nidulans
gttctcgagacgagcgatcgctcaaatcccacgctcgagatcgaggac

SEQ ID NO: 43700 - DNA, 45 bp, Emericella nidulans
gaattcactgcggccgccatgaggaaatatgggctaactaacgaa

SEQ ID NO: 43701 - DNA, 46 bp, Emericella nidulans
gttctcgagacgagcgatcgcctagttggcaatacttggtatttga

SEQ ID NO: 43702 - DNA, 49 bp, Emericella nidulans
gaattcactgcggccgccatgctagccctaacccagaatccccagtacg

SEQ ID NO: 43703 - DNA, 49 bp, Emericella nidulans
gttctcgagacgagcgatcgcttaccgactcataccagcgtcgggcttc

SEQ ID NO: 43704 - DNA, 45 bp, Emericella nidulans
gaattcactgcggccgccatgaagctaagtcccggttctcttgaa

SEQ ID NO: 43705 - DNA, 44 bp, Emericella nidulans
gttctcgagacgagcgatcgcctaaaccatcggcttctccatcg

SEQ ID NO: 43706 - DNA, 49 bp, Emericella nidulans
gaattcactgcggccgccatggcaagcgaggagctacaacagaaagatg

SEQ ID NO: 43707 - DNA, 45 bp, Emericella nidulans
gttctcgagacgagcgatcgctcatcgtggtggtcttcggtgaat

SEQ ID NO: 43708 - DNA, 46 bp, Emericella nidulans
gaattcactgcggccgccatgcctggcggaaagggaaagtctatcg

SEQ ID NO: 43709 - DNA, 50 bp, Emericella nidulans
gttctcgagacgagcgatcgcttatgcgtccttcttcttcttctgttcca

SEQ ID NO: 43710 - DNA, 45 bp, Emericella nidulans
gaattcactgcggccgccatgcccctcacaacgtaccacctctcc

SEQ ID NO: 43711 - DNA, 52 bp, Emericella nidulans
gttctcgagacgagcgatcgcctacttgaaccagtatccattcaacccttcc

SEQ ID NO: 43712 - DNA, 41 bp, Emericella nidulans
gaattcactgcggccgccatggccaacaaggctctcggacc

SEQ ID NO: 43713 - DNA, 47 bp, Emericella nidulans
gttctcgagacgagcgatcgcttaaagcttgtttgtaacctcgatga

SEQ ID NO: 43714 - DNA, 42 bp, Emericella nidulans
gaattcactgcggccgccatggcgaacggtttcgcgtactgg

SEQ ID NO: 43715 - DNA, 45 bp, Emericella nidulans; identical to SEQ ID NO: 38979

SEQ ID NO: 43716 - DNA, 45 bp, Emericella nidulans
gaattcactgcggccgccatgacacgcctgaagactgggctaacg

SEQ ID NO: 43717 - DNA, 47 bp, Emericella nidulans
gttctcgagacgagcgatcgctcacttctcgtctacatccggccctc

SEQ ID NO: 43718 - DNA, 40 bp, Emericella nidulans
gaattcactgcggccgccatggcctctcgtcggggcgttg

SEQ ID NO: 43719 - DNA, 49 bp, Emericella nidulans
gttctcgagacgagcgatcgcctagcccctgttctcctttcgagtcttg

SEQ ID NO: 43720 - DNA, 49 bp, Emericella nidulans
gaattcactgcggccgccatggatgaggagacggcaaaacatagagagg

SEQ ID NO: 43721 - DNA, 51 bp, Emericella nidulans
gttctcgagacgagcgatcgcctataacgccaaatcctcttccatcacttc

SEQ ID NO: 43722 - DNA, 39 bp, Emericella nidulans
gaattcactgcggccgccatgcctggcttgttcatcgac

SEQ ID NO: 43723 - DNA, 42 bp, Emericella nidulans
gttctcgagacgagcgatcgcctaagcgtcccatgtctcaag

SEQ ID NO: 43724 - DNA, 42 bp, Emericella nidulans
gaattcactgcggccgccatgaaactggccaacttccgtgtg

SEQ ID NO: 43725 - DNA, 41 bp, Emericella nidulans
gttctcgagacgagcgatcgctcacgcgtcgataacggtaa

SEQ ID NO: 43726 - DNA, 45 bp, Emericella nidulans
gaattcactgcggccgccatgttagggttgacggaagcggaaagc

SEQ ID NO: 43727 - DNA, 43 bp, Emericella nidulans
gttctcgagacgagcgatcgcctaccggtgcctgctggggttc

SEQ ID NO: 43728 - DNA, 48 bp, Emericella nidulans
gaattcactgcggccgccatgttcgcaacagagagaatcaccgcatcc

SEQ ID NO: 43729 - DNA, 55 bp, Emericella nidulans
gttctcgagacgagcgatcgcctaaagcaattcttgaagttttctcatttgttcg

SEQ ID NO: 43730 - DNA, 45 bp, Emericella nidulans
gaattcactgcggccgccatgatgtccaccaccttcttcgtttcc

SEQ ID NO: 43731 - DNA, 46 bp, Emericella nidulans
gttctcgagacgagcgatcgcttagttgtcgtgcctaacagtgaca

SEQ ID NO: 43732 - DNA, 41 bp, Emericella nidulans
gaattcactgcggccgccatggtgcagcgctcgtccacctg

SEQ ID NO: 43733 - DNA, 49 bp, Emericella nidulans
gttctcgagacgagcgatcgcctatttcatcggcttccaactcagagcc

SEQ ID NO: 43734 - DNA, 48 bp, Emericella nidulans
gaattcactgcggccgccatgcttgcttacgatactgccaatgaggct

SEQ ID NO: 43735 - DNA, 44 bp, Emericella nidulans
gttctcgagacgagcgatcgctcaaccctcaccgccagactttg

SEQ ID NO: 43736 - DNA, 48 bp, Emericella nidulans
gaattcactgcggccgccatgaaggttctggtctgcccatctggcttc

SEQ ID NO: 43737 - DNA, 41 bp, Emericella nidulans
gttctcgagacgagcgatcgctcagccgcctcggtcaggag

SEQ ID NO: 43738 - DNA, 42 bp, Emericella nidulans
gaattcactgcggccgccatgccaaatccgccatccacactt

SEQ ID NO: 43739 - DNA, 45 bp, Emericella nidulans
gttctcgagacgagcgatcgctcagcccctcacaatataataccc

SEQ ID NO: 43740 - DNA, 44 bp, Emericella nidulans
gaattcactgcggccgccatggtagccccaggttcgtccctgct

SEQ ID NO: 43741 - DNA, 50 bp, Emericella nidulans
gttctcgagacgagcgatcgcttaaatgccgaaatcaagatcagcttctg

SEQ ID NO: 43742 - DNA, 47 bp, Emericella nidulans
gaattcactgcggccgccatggcatctccctacgttgtccttgtcac

SEQ ID NO: 43743 - DNA, 46 bp, Emericella nidulans
gttctcgagacgagcgatcgcttagagcaccggtaccccgattgtc

SEQ ID NO: 43744 - DNA, 49 bp, Emericella nidulans
gaattcactgcggccgccatgaatgagattctcgagggcccagaaaacg

SEQ ID NO: 43745 - DNA, 53 bp, Emericella nidulans
gttctcgagacgagcgatcgcctagtcgacgagtgcagaacttacttccgtat

SEQ ID NO: 43746 - DNA, 43 bp, Emericella nidulans
gaattcactgcggccgccatgattggcgaagagaaaaccgatg

SEQ ID NO: 43747 - DNA, 40 bp, Emericella nidulans
gttctcgagacgagcgatcgcttacaagggcactgccacc

SEQ ID NO: 43748 - DNA, 45 bp, Emericella nidulans
gaattcactgcggccgccatggcgtcgacatcctcatctcagtcg

SEQ ID NO: 43749 - DNA, 46 bp, Emericella nidulans
gttctcgagacgagcgatcgctcatgcatcgtcatcaaccacttcc

SEQ ID NO: 43750 - DNA, 51 bp, Emericella nidulans
gaattcactgcggccgccatgacagatagcacaagtccgcctccgagctac

SEQ ID NO: 43751 - DNA, 50 bp, Emericella nidulans
gttctcgagacgagcgatcgctcagcacatttttgatggaaacccgtcct

SEQ ID NO: 43752 - DNA, 44 bp, Emericella nidulans
gaattcactgcggccgccatgctggctgcccgtcaacgaaaaat

SEQ ID NO: 43753 - DNA, 45 bp, Emericella nidulans
gttctcgagacgagcgatcgcttaatcccgcgcggtgttaatgtc

SEQ ID NO: 43754 - DNA, 45 bp, Emericella nidulans
gaattcactgcggccgccatgccctacctcgcgaatccctctctc

SEQ ID NO: 43755 - DNA, 45 bp, Emericella nidulans
gttctcgagacgagcgatcgctcaaggtgcgccagtgtgtaccaa

SEQ ID NO: 43756 - DNA, 41 bp, Emericella nidulans
gaattcactgcggccgccatgcgcctgctccctctcgttgc

SEQ ID NO: 43757 - DNA, 53 bp, Emericella nidulans
gttctcgagacgagcgatcgcttataaccgccatagaaaggaccaaagaatga

SEQ ID NO: 43758 - DNA, 49 bp, Emericella nidulans
gaattcactgcggccgccatggctagaatcgacgcctcgaaatcagcat

SEQ ID NO: 43759 - DNA, 50 bp, Emericella nidulans
gttctcgagacgagcgatcgcttaaccagtgcgatgtctttcctcacttc

SEQ ID NO: 43760 - DNA, 52 bp, Emericella nidulans
gaattcactgcggccgccatgctcaagccgtttctgataagggaccttcacg

SEQ ID NO: 43761 - DNA, 51 bp, Emericella nidulans
gttctcgagacgagcgatcgctcagtgaaacggagggatatatggaaactg

SEQ ID NO: 43762 - DNA, 49 bp, Emericella nidulans
gaattcactgcggccgccatgtggaccgatatcgactacatggatcacc

SEQ ID NO: 43763 - DNA, 45 bp, Emericella nidulans
gttctcgagacgagcgatcgcctacagctcaacacctcccggtcc

SEQ ID NO: 43764 - DNA, 49 bp, Emericella nidulans
gaattcactgcggccgccatggcctattacaccattgcccatattttgc

SEQ ID NO: 43765 - DNA, 43 bp, Emericella nidulans
gttctcgagacgagcgatcgctcaaccggagcccagaactccc

SEQ ID NO: 43766 - DNA, 49 bp, Emericella nidulans
gaattcactgcggccgccatgggtctgatctacgacgctatgggctatg

SEQ ID NO: 43767 - DNA, 46 bp, Emericella nidulans
gttctcgagacgagcgatcgcttaacaagtccaggccgcaacaatg

SEQ ID NO: 43768 - DNA, 44 bp, Emericella nidulans
gaattcactgcggccgccatggactcctcactcacaaaccccac

SEQ ID NO: 43769 - DNA, 45 bp, Emericella nidulans
gttctcgagacgagcgatcgcctaagtctcgaccctctgcttgaa

SEQ ID NO: 43770 - DNA, 44 bp, Emericella nidulans
gaattcactgcggccgccatgcgtctgcgtattgtcgacgagga

SEQ ID NO: 43771 - DNA, 45 bp, Emericella nidulans
gttctcgagacgagcgatcgcttacaacttggaaccgccagcctc

SEQ ID NO: 43772 - DNA, 44 bp, Emericella nidulans
gaattcactgcggccgccatgccgcaaaccaagccctacatccc

SEQ ID NO: 43773 - DNA, 56 bp, Emericella nidulans
gttctcgagacgagcgatcgcctatactgatgagacacatgcggtcctatactttt

SEQ ID NO: 43774 - DNA, 50 bp, Emericella nidulans
gaattcactgcggccgccatggcagaagaaggagaaaagggtcagtcatc

SEQ ID NO: 43775 - DNA, 45 bp, Emericella nidulans
gttctcgagacgagcgatcgctcattgctgcggacaatcggggat

SEQ ID NO: 43776 - DNA, 43 bp, Emericella nidulans
gaattcactgcggccgccatggctcaaccacaaaacgaccaag

SEQ ID NO: 43777 - DNA, 46 bp, Emericella nidulans
gttctcgagacgagcgatcgctcaggtctttccatgttgattctca

SEQ ID NO: 43778 - DNA, 41 bp, Emericella nidulans
gaattcactgcggccgccatggcttgggccgttgcgatttg

SEQ ID NO: 43779 - DNA, 46 bp, Emericella nidulans
gttctcgagacgagcgatcgctcagatagcctcctggacgtggtca

SEQ ID NO: 43780 - DNA, 40 bp, Emericella nidulans
gaattcactgcggccgccatgcgcgacgcccagtacattg

SEQ ID NO: 43781 - DNA, 45 bp, Emericella nidulans
gttctcgagacgagcgatcgctcaacggtatgtgaggttcaactg

SEQ ID NO: 43782 - DNA, 52 bp, Emericella nidulans
gaattcactgcggccgccatggctgtacagctaaacaaaacagcagctatgc

SEQ ID NO: 43783 - DNA, 48 bp, Emericella nidulans
gttctcgagacgagcgatcgcctagggaatatacggctcagccccttc

SEQ ID NO: 43784 - DNA, 44 bp, Emericella nidulans
gaattcactgcggccgccatgctcctctcactgctccccctctt

SEQ ID NO: 43785 - DNA, 43 bp, Emericella nidulans
gttctcgagacgagcgatcgcttatgttgggggaacgctggat

SEQ ID NO: 43786 - DNA, 46 bp, Emericella nidulans
gaattcactgcggccgccatgtggactgttggaaacacgaatggaa

SEQ ID NO: 43787 - DNA, 45 bp, Emericella nidulans
gttctcgagacgagcgatcgcctaccccctcttaggcgcgttcac

SEQ ID NO: 43788 - DNA, 45 bp, Emericella nidulans
gaattcactgcggccgccatgtcttccaccaacaagtcctctcct

SEQ ID NO: 43789 - DNA, 46 bp, Emericella nidulans
gttctcgagacgagcgatcgcttatcggaaagctaggtaatgagcc

SEQ ID NO: 43790 - DNA, 44 bp, Emericella nidulans
gaattcactgcggccgccatggaccgttctaactgtgataacca

SEQ ID NO: 43791 - DNA, 40 bp, Emericella nidulans
gttctcgagacgagcgatcgctcattgattcccacctagc

SEQ ID NO: 43792 - DNA, 41 bp, Emericella nidulans
gaattcactgcggccgccatgcaaggtggcgccttgggtcc

SEQ ID NO: 43793 - DNA, 45 bp, Emericella nidulans
gttctcgagacgagcgatcgctcaggccttggcttccttgacttg

SEQ ID NO: 43794 - DNA, 43 bp, Emericella nidulans
gaattcactgcggccgccatgtctttcctcgcccgcgctactc

SEQ ID NO: 43795 - DNA, 45 bp, Emericella nidulans
gttctcgagacgagcgatcgctcatgacttgaactccccggcaac

SEQ ID NO: 43796 - DNA, 46 bp, Emericella nidulans
gaattcactgcggccgccatgaacaaaatccgttcattggaagagc

SEQ ID NO: 43797 - DNA, 42 bp, Emericella nidulans
gttctcgagacgagcgatcgcctaagacccgctgagcaactg

SEQ ID NO: 43798 - DNA, 46 bp, Emericella nidulans
gaattcactgcggccgccatggcaacgctttccaaacatcacctcc

SEQ ID NO: 43799 - DNA, 48 bp, Emericella nidulans
gttctcgagacgagcgatcgctcaacgatttagagcctccccgccttc

SEQ ID NO: 43800 - DNA, 46 bp, Emericella nidulans
gaattcactgcggccgccatgtgtattgagcctgtggagctgtggt

SEQ ID NO: 43801 - DNA, 44 bp, Emericella nidulans
gttctcgagacgagcgatcgctcaccagcgttggtgacggctct

SEQ ID NO: 43802 - DNA, 46 bp, Emericella nidulans
gaattcactgcggccgccatggaggatgaggaggaaggcgaagacc

SEQ ID NO: 43803 - DNA, 55 bp, Emericella nidulans
gttctcgagacgagcgatcgcttaatcatagaggctgtcgtcattaccggcttca

SEQ ID NO: 43804 - DNA, 49 bp, Emericella nidulans
gaattcactgcggccgccatgtctctcgtcgacgaccacactgatcaca

SEQ ID NO: 43805 - DNA, 49 bp, Emericella nidulans
gttctcgagacgagcgatcgcctacgcttcttccttggccttcttcttg

SEQ ID NO: 43806 - DNA, 46 bp, Emericella nidulans
gaattcactgcggccgccatggacgcagatgtgtattggcgctccc

SEQ ID NO: 43807 - DNA, 55 bp, Emericella nidulans
gttctcgagacgagcgatcgcttacgaacctccactagcaatcatagacgcatcc

SEQ ID NO: 43808 - DNA, 53 bp, Emericella nidulans
gaattcactgcggccgccatggaacagctgaagtctcgcttcagcaagaacaa

SEQ ID NO: 43809 - DNA, 52 bp, Emericella nidulans
gttctcgagacgagcgatcgcttagcggtgctcatagtgtataaggctgatt

SEQ ID NO: 43810 - DNA, 50 bp, Emericella nidulans
gaattcactgcggccgccatgcaattcacaatcgcttcccttatcgccac

SEQ ID NO: 43811 - DNA, 50 bp, Emericella nidulans
gttctcgagacgagcgatcgcttagagaacctggacaggaacacaaggaa

SEQ ID NO: 43812 - DNA, 45 bp, Emericella nidulans
gaattcactgcggccgccatgtctctttcaaaagccgacacagat

SEQ ID NO: 43813 - DNA, 47 bp, Emericella nidulans
gttctcgagacgagcgatcgctcatcgcttctttctcttctttgacc

SEQ ID NO: 43814 - DNA, 48 bp, Emericella nidulans
gaattcactgcggccgccatggtgcccatcattgcaacatggtacttc

SEQ ID NO: 43815 - DNA, 50 bp, Emericella nidulans
gttctcgagacgagcgatcgctcacttgtcgagaggtaatgcatcaatca

SEQ ID NO: 43816 - DNA, 46 bp, Emericella nidulans
gaattcactgcggccgccatgaaggcctactggtacgacaacaagc

SEQ ID NO: 43817 - DNA, 45 bp, Emericella nidulans
gttctcgagacgagcgatcgcctagttcgcagcaattgaggtagc

SEQ ID NO: 43818 - DNA, 48 bp, Emericella nidulans
gaattcactgcggccgccatggaggagaagcaggcagctgaagactgt

SEQ ID NO: 43819 - DNA, 51 bp, Emericella nidulans
gttctcgagacgagcgatcgcctactcaatagcgatatccgcacagtgcaa

SEQ ID NO: 43820 - DNA, 45 bp, Emericella nidulans
gaattcactgcggccgccatggctacaaacacaactttgctctat

SEQ ID NO: 43821 - DNA, 44 bp, Emericella nidulans
gttctcgagacgagcgatcgcctataagacactgctgggcacac

SEQ ID NO: 43822 - DNA, 43 bp, Emericella nidulans
gaattcactgcggccgccatgcaggatatagcagacgccatcg

SEQ ID NO: 43823 - DNA, 47 bp, Emericella nidulans
gttctcgagacgagcgatcgcctaaagcgcagcaataactttcttca

SEQ ID NO: 43824 - DNA, 42 bp, Emericella nidulans
gaattcactgcggccgccatggcccagcaacaggatgacaat

SEQ ID NO: 43825 - DNA, 45 bp, Emericella nidulans
gttctcgagacgagcgatcgctcatagcacaatgcaacatgagga

SEQ ID NO: 43826 - DNA, 50 bp, Emericella nidulans
gaattcactgcggccgccatggctaaccgtccagtctccgtactgggcta

SEQ ID NO: 43827 - DNA, 44 bp, Emericella nidulans
gttctcgagacgagcgatcgcttaacccagggcaaccggaacag

SEQ ID NO: 43828 - DNA, 46 bp, Emericella nidulans
gaattcactgcggccgccatgggcctgaacgaggttgtctcggagc

SEQ ID NO: 43829 - DNA, 47 bp, Emericella nidulans
gttctcgagacgagcgatcgcctaatccaaatcagcaaacgccatga

SEQ ID NO: 43830 - DNA, 52 bp, Emericella nidulans
gaattcactgcggccgccatggttgcaacacacatagaatacaccaaggaaa

SEQ ID NO: 43831 - DNA, 45 bp, Emericella nidulans
gttctcgagacgagcgatcgctcaaggggagcatcgttcatctgg

SEQ ID NO: 43832 - DNA, 42 bp, Emericella nidulans
gaattcactgcggccgccatggaaacgcaagggcacgggtgt

SEQ ID NO: 43833 - DNA, 44 bp, Emericella nidulans
gttctcgagacgagcgatcgctcaagcagatctgggaccggagg

SEQ ID NO: 43834 - DNA, 46 bp, Emericella nidulans
gaattcactgcggccgccatgggtgtcgaagttcagcgcatttctc

SEQ ID NO: 43835 - DNA, 55 bp, Emericella nidulans
gttctcgagacgagcgatcgcttagttgatcttgagaagctcaacctcgctactc

SEQ ID NO: 43836 - DNA, 47 bp, Emericella nidulans
gaattcactgcggccgccatggaccagacgtacaaccccacgccttc

SEQ ID NO: 43837 - DNA, 53 bp, Emericella nidulans
gttctcgagacgagcgatcgctcactgtccctcctcatcatccatgaataacc

SEQ ID NO: 43838 - DNA, 46 bp, Emericella nidulans
gaattcactgcggccgccatggtgagctctccagatccgaatcatc

SEQ ID NO: 43839 - DNA, 46 bp, Emericella nidulans
gttctcgagacgagcgatcgcttattggcgaagatcaagaggatgg

SEQ ID NO: 43840 - DNA, 48 bp, Emericella nidulans
gaattcactgcggccgccatgccgaaatacagcgcccagtatcccaat

SEQ ID NO: 43841 - DNA, 46 bp, Emericella nidulans
gttctcgagacgagcgatcgcttagcaacgttcagtcgcaggcttt

SEQ ID NO: 43842 - DNA, 42 bp, Emericella nidulans
gaattcactgcggccgccatgttgggaccacgcgaccaactc

SEQ ID NO: 43843 - DNA, 52 bp, Emericella nidulans
gttctcgagacgagcgatcgctcaagacttccttcccacaaagtagtacagc

SEQ ID NO: 43844 - DNA, 46 bp, Emericella nidulans
gaattcactgcggccgccatgtcatccgataccttcaagcgacacc

SEQ ID NO: 43845 - DNA, 53 bp, Emericella nidulans
gttctcgagacgagcgatcgcctacaccttctggaacttaacgtgcttcattc

SEQ ID NO: 43846 - DNA, 40 bp, Emericella nidulans
gaattcactgcggccgccatgttctctccgctagcgttcc

SEQ ID NO: 43847 - DNA, 41 bp, Emericella nidulans
gttctcgagacgagcgatcgctcagggatacacctcgctct

SEQ ID NO: 43848 - DNA, 49 bp, Emericella nidulans
gaattcactgcggccgccatgtccaaaggtgtttccgaagtttttgttt

SEQ ID NO: 43849 - DNA, 49 bp, Emericella nidulans
gttctcgagacgagcgatcgcttatacactgcgaagcgcagattctcct

SEQ ID NO: 43850 - DNA, 48 bp, Emericella nidulans
gaattcactgcggccgccatggatcagctgaaaggaaaggctgtcaaa

SEQ ID NO: 43851 - DNA, 47 bp, Emericella nidulans
gttctcgagacgagcgatcgctcatttcccttccctcatcgtgaacc

SEQ ID NO: 43852 - DNA, 45 bp, Emericella nidulans
gaattcactgcggccgccatgctgaatattgcctcggcccagctc

SEQ ID NO: 43853 - DNA, 54 bp, Emericella nidulans
gttctcgagacgagcgatcgcctaaactttcagaccctgcaaggtactttctgc

SEQ ID NO: 43854 - DNA, 44 bp, Emericella nidulans
gaattcactgcggccgccatgtcttccaaaacgacacccaccgt

SEQ ID NO: 43855 - DNA, 45 bp, Emericella nidulans
gttctcgagacgagcgatcgcctattccgatgcgccgttcttctt

SEQ ID NO: 43856 - DNA, 44 bp, Emericella nidulans
gaattcactgcggccgccatggggtccatacaggtcgaggactt

SEQ ID NO: 43857 - DNA, 45 bp, Emericella nidulans
gttctcgagacgagcgatcgcctatccggcataatcatcgtagcc

SEQ ID NO: 43858 - DNA, 45 bp, Emericella nidulans
gaattcactgcggccgccatgggtccaaggaaggtcatcgttttt

SEQ ID NO: 43859 - DNA, 47 bp, Emericella nidulans
gttctcgagacgagcgatcgctcaagcactgaacttgtctttgttcc

SEQ ID NO: 43860 - DNA, 54 bp, Emericella nidulans
gaattcactgcggccgccatgcctataagtacggaactatgcagagactgggtt

SEQ ID NO: 43861 - DNA, 49 bp, Emericella nidulans
gttctcgagacgagcgatcgcctaccattccttaacctgcccgggcttt

SEQ ID NO: 43862 - DNA, 49 bp, Emericella nidulans
gaattcactgcggccgccatgactctggtcgtgatagtgactgctctgc

SEQ ID NO: 43863 - DNA, 49 bp, Emericella nidulans
gttctcgagacgagcgatcgcctaattcagaccaaacccctgccgctcc

SEQ ID NO: 43864 - DNA, 45 bp, Emericella nidulans
gaattcactgcggccgccatgcttcagcatccctcctccaccaca

SEQ ID NO: 43865 - DNA, 46 bp, Emericella nidulans
gttctcgagacgagcgatcgcctaaagaggccctcctttccaggtg

SEQ ID NO: 43866 - DNA, 43 bp, Emericella nidulans
gaattcactgcggccgccatggccgctcaaagctactacaacg

SEQ ID NO: 43867 - DNA, 41 bp, Emericella nidulans
gttctcgagacgagcgatcgcttatccaaacccggcaggag

SEQ ID NO: 43868 - DNA, 47 bp, Emericella nidulans
gaattcactgcggccgccatggctttgaccctgacaggcgctatgct

SEQ ID NO: 43869 - DNA, 50 bp, Emericella nidulans
gttctcgagacgagcgatcgctcagtaaccaagcttaaagccgccccaat

SEQ ID NO: 43870 - DNA, 46 bp, Emericella nidulans
gaattcactgcggccgccatgtcgaaactcaaggtcgccatctctc

SEQ ID NO: 43871 - DNA, 50 bp, Emericella nidulans
gttctcgagacgagcgatcgcttatagagcaggtggactcagatccaagc

SEQ ID NO: 43872 - DNA, 50 bp, Emericella nidulans
gaattcactgcggccgccatggcacctcaacgtatcctcactaccccctc

SEQ ID NO: 43873 - DNA, 56 bp, Emericella nidulans
gttctcgagacgagcgatcgcctattttctcttgactgttggtttgggatttccag

SEQ ID NO: 43874 - DNA, 50 bp, Emericella nidulans
gaattcactgcggccgccatgctatctaatttcctccatggcaacagcaa

SEQ ID NO: 43875 - DNA, 44 bp, Emericella nidulans
gttctcgagacgagcgatcgcctaatgtcgagcagcggacgtga

SEQ ID NO: 43876 - DNA, 41 bp, Emericella nidulans
gaattcactgcggccgccatggccgctaagatcgatgctcc

SEQ ID NO: 43877 - DNA, 47 bp, Emericella nidulans
gttctcgagacgagcgatcgcctatttggagggagcaatctcaacac

SEQ ID NO: 43878 - DNA, 53 bp, Emericella nidulans
gaattcactgcggccgccatggaaggcaaatcgaataagtccacaagagatca

SEQ ID NO: 43879 - DNA, 48 bp, Emericella nidulans
gttctcgagacgagcgatcgcctagagggtcgatagcgcagctctgtt

SEQ ID NO: 43880 - DNA, 45 bp, Emericella nidulans
gaattcactgcggccgccatgaaagtctgcccgtacaaagccctc

SEQ ID NO: 43881 - DNA, 45 bp, Emericella nidulans
gttctcgagacgagcgatcgcctacgccaaagtaactttgaaccc

SEQ ID NO: 43882 - DNA, 49 bp, Emericella nidulans
gaattcactgcggccgccatgcaacccaacaaagtcccattcctctaca

SEQ ID NO: 43883 - DNA, 49 bp, Emericella nidulans
gttctcgagacgagcgatcgctcagcgtatattgtcggcaccagacacc

SEQ ID NO: 43884 - DNA, 48 bp, Emericella nidulans
gaattcactgcggccgccatggttctgaatcatgccccgttactgacc

SEQ ID NO: 43885 - DNA, 54 bp, Emericella nidulans
gttctcgagacgagcgatcgcctagtttgccatggtactttcgttgaacaaatc

SEQ ID NO: 43886 - DNA, 39 bp, Emericella nidulans
gaattcactgcggccgccatgtcagtcagtggcccttgc

SEQ ID NO: 43887 - DNA, 48 bp, Emericella nidulans
gttctcgagacgagcgatcgcctataagtagttggcatagtcgtatcc

SEQ ID NO: 43888 - DNA, 47 bp, Emericella nidulans
gaattcactgcggccgccatgacagttctgacgtctcctctccgaat

SEQ ID NO: 43889 - DNA, 49 bp, Emericella nidulans
gttctcgagacgagcgatcgcttagagtttctcaattataccgccgagt

SEQ ID NO: 43890 - DNA, 42 bp, Emericella nidulans
gaattcactgcggccgccatggccacgtccactgcttttaat

SEQ ID NO: 43891 - DNA, 43 bp, Emericella nidulans
gttctcgagacgagcgatcgcctatatttcgctcttcagggtc

SEQ ID NO: 43892 - DNA, 42 bp, Emericella nidulans
gaattcactgcggccgccatgagtggaggcatgactgattgg

SEQ ID NO: 43893 - DNA, 53 bp, Emericella nidulans
gttctcgagacgagcgatcgcttagtacgatgaggtaagatagacaggattcg

SEQ ID NO: 43894 - DNA, 49 bp, Emericella nidulans
gaattcactgcggccgccatgttgcaagtgaaacttcatctgggaagtc

SEQ ID NO: 43895 - DNA, 52 bp, Emericella nidulans
gttctcgagacgagcgatcgctcatcggttgaatctaaagatctccatgaac

SEQ ID NO: 43896 - DNA, 53 bp, Emericella nidulans
gaattcactgcggccgccatgagtcaagtatttgctctgaaacgagaacactg

SEQ ID NO: 43897 - DNA, 47 bp, Emericella nidulans
gttctcgagacgagcgatcgcttagtggggtccaatggtgaagagcc

SEQ ID NO: 43898 - DNA, 39 bp, Emericella nidulans
gaattcactgcggccgccatggctgacagcatccagacc

SEQ ID NO: 43899 - DNA, 39 bp, Emericella nidulans
gttctcgagacgagcgatcgctcattccaggcgttctcc

SEQ ID NO: 43900 - DNA, 46 bp, Emericella nidulans
gaattcactgcggccgccatgcccgtcccatatccttttaagttca

SEQ ID NO: 43901 - DNA, 45 bp, Emericella nidulans
gttctcgagacgagcgatcgctcagttgggcggattgactagacc

SEQ ID NO: 43902 - DNA, 45 bp, Emericella nidulans
gaattcactgcggccgccatgcagagcgctacagacggcctccag

SEQ ID NO: 43903 - DNA, 44 bp, Emericella nidulans
gttctcgagacgagcgatcgctcaaagagccttaagcggcgtga

SEQ ID NO: 43904 - DNA, 49 bp, Emericella nidulans
gaattcactgcggccgccatggcgactgtgacactacagacaccctctg

SEQ ID NO: 43905 - DNA, 49 bp, Emericella nidulans
gttctcgagacgagcgatcgctcacggagagggaacaaggatatccaaa

SEQ ID NO: 43906 - DNA, 43 bp, Emericella nidulans
gaattcactgcggccgccatgaatggccacgtcgaacctgctg

SEQ ID NO: 43907 - DNA, 47 bp, Emericella nidulans
gttctcgagacgagcgatcgctcaagtcgctggatcgtgaacgttgt

SEQ ID NO: 43908 - DNA, 46 bp, Emericella nidulans
gaattcactgcggccgccatggccgccgacacctttaattcaaacc

SEQ ID NO: 43909 - DNA, 46 bp, Emericella nidulans
gttctcgagacgagcgatcgctcacgggttgatcatggtatgtgga

SEQ ID NO: 43910 - DNA, 44 bp, Emericella nidulans
gaattcactgcggccgccatgaagaaagccaaccacgactcagc

SEQ ID NO: 43911 - DNA, 46 bp, Emericella nidulans
gttctcgagacgagcgatcgcctagggagatctcttccttgtcgaa

SEQ ID NO: 43912 - DNA, 46 bp, Emericella nidulans
gaattcactgcggccgccatggttgaggccattgttggatggggtg

SEQ ID NO: 43913 - DNA, 56 bp, Emericella nidulans
gttctcgagacgagcgatcgcttatatttttgatttgtatccgcatctgattttgg

SEQ ID NO: 43914 - DNA, 44 bp, Emericella nidulans
gaattcactgcggccgccatgcagtaccgaatgtacaggaactc

SEQ ID NO: 43915 - DNA, 40 bp, Emericella nidulans
gttctcgagacgagcgatcgcctacgacagcattcgttgc

SEQ ID NO: 43916 - DNA, 45 bp, Emericella nidulans
gaattcactgcggccgccatggaagatgcccacgctgccgttcta

SEQ ID NO: 43917 - DNA, 45 bp, Emericella nidulans
gttctcgagacgagcgatcgctcagtagggattggaggccgtggg

SEQ ID NO: 43918 - DNA, 45 bp, Emericella nidulans
gaattcactgcggccgccatgccgtactgggctcaaaccttttct

SEQ ID NO: 43919 - DNA, 42 bp, Emericella nidulans
gttctcgagacgagcgatcgcctagaccgacaccccatcagg

SEQ ID NO: 43920 - DNA, 43 bp, Emericella nidulans
gaattcactgcggccgccatggaagttgggctggtttttctac

SEQ ID NO: 43921 - DNA, 46 bp, Emericella nidulans
gttctcgagacgagcgatcgcttatctgacactgaagaaagcatga

SEQ ID NO: 43922 - DNA, 47 bp, Emericella nidulans
gaattcactgcggccgccatggcgcagaaatacgctaaagaccaacc

SEQ ID NO: 43923 - DNA, 51 bp, Emericella nidulans
gttctcgagacgagcgatcgctcaatcagactccggcattctcatataggc

SEQ ID NO: 43924 - DNA, 44 bp, Emericella nidulans
gaattcactgcggccgccatggctggcttgctcgagactatcat

SEQ ID NO: 43925 - DNA, 45 bp, Emericella nidulans
gttctcgagacgagcgatcgctcatgttcctttgacttgagaggc

SEQ ID NO: 43926 - DNA, 45 bp, Emericella nidulans
gaattcactgcggccgccatgcatcgcatgggaaaggtccaggaa

SEQ ID NO: 43927 - DNA, 46 bp, Emericella nidulans
gttctcgagacgagcgatcgcttatgttgaccggtaacccccaaga

SEQ ID NO: 43928 - DNA, 45 bp, Emericella nidulans
gaattcactgcggccgccatggctaccgccgaacctcaccacctt

SEQ ID NO: 43929 - DNA, 45 bp, Emericella nidulans
gttctcgagacgagcgatcgctcagatggtccagatgacgacacg

SEQ ID NO: 43930 - DNA, 45 bp, Emericella nidulans
gaattcactgcggccgccatgtacacccttgttcacttcttcaac

SEQ ID NO: 43931 - DNA, 42 bp, Emericella nidulans
gttctcgagacgagcgatcgcctaattcgttccatcaagagc

SEQ ID NO: 43932 - DNA, 39 bp, Emericella nidulans
gaattcactgcggccgccatgcctcctccgccccataat

SEQ ID NO: 43933 - DNA, 49 bp, Emericella nidulans
gttctcgagacgagcgatcgcctagatccaccatagcataacagacaca

SEQ ID NO: 43934 - DNA, 39 bp, Emericella nidulans
gaattcactgcggccgccatgtccctggcagagggagat

SEQ ID NO: 43935 - DNA, 44 bp, Emericella nidulans
gttctcgagacgagcgatcgcttatcgtaacaccctcattggag

SEQ ID NO: 43936 - DNA, 45 bp, Emericella nidulans
gaattcactgcggccgccatggcgcacattgtttctgtggaagga

SEQ ID NO: 43937 - DNA, 55 bp, Emericella nidulans
gttctcgagacgagcgatcgcttacataatatacgtgaacacctccctcctttgc

SEQ ID NO: 43938 - DNA, 48 bp, Emericella nidulans
gaattcactgcggccgccatgccttcgggtactggaaagacggttaca

SEQ ID NO: 43939 - DNA, 46 bp, Emericella nidulans
gttctcgagacgagcgatcgctcactgcgcatccaacatcatgaga

SEQ ID NO: 43940 - DNA, 49 bp, Emericella nidulans
gaattcactgcggccgccatgtatctcaattcagcgggacggcagaagg

SEQ ID NO: 43941 - DNA, 47 bp, Emericella nidulans
gttctcgagacgagcgatcgcctaaccgtgtcgtccactttcgctct

SEQ ID NO: 43942 - DNA, 50 bp, Emericella nidulans
gaattcactgcggccgccatggctgagacagattctttcctgcacctttc

SEQ ID NO: 43943 - DNA, 44 bp, Emericella nidulans
gttctcgagacgagcgatcgcctatgcgcgaccttcctcagcac

SEQ ID NO: 43944 - DNA, 47 bp, Emericella nidulans
gaattcactgcggccgccatgaccatcccgcctctacctaagcgtgt

SEQ ID NO: 43945 - DNA, 50 bp, Emericella nidulans
gttctcgagacgagcgatcgctcaggtcaaaattccatagccatctctcc

SEQ ID NO: 43946 - DNA, 41 bp, Emericella nidulans
gaattcactgcggccgccatgtccaccaccaccgcgacact

SEQ ID NO: 43947 - DNA, 45 bp, Emericella nidulans
gttctcgagacgagcgatcgctcactgcaaaacccgtccgttctt

SEQ ID NO: 43948 - DNA, 49 bp, Emericella nidulans
gaattcactgcggccgccatgacggagtggaaggtgaccattattcacg

SEQ ID NO: 43949 - DNA, 45 bp, Emericella nidulans
gttctcgagacgagcgatcgctcaagtttccaccttgcccctttg

SEQ ID NO: 43950 - DNA, 46 bp, Emericella nidulans
gaattcactgcggccgccatgcttctccgcggtaaggctttcaaca

SEQ ID NO: 43951 - DNA, 52 bp, Emericella nidulans
gttctcgagacgagcgatcgcctacaaaaagctgtcaactttcccattcaaa

SEQ ID NO: 43952 - DNA, 47 bp, Emericella nidulans
gaattcactgcggccgccatgcaatcccgtttcgagaacggaagacc

SEQ ID NO: 43953 - DNA, 49 bp, Emericella nidulans
gttctcgagacgagcgatcgcctacaaccgacttcctcgttccttgtcc

SEQ ID NO: 43954 - DNA, 42 bp, Emericella nidulans
gaattcactgcggccgccatggctgaagtcgagggcaagacc

SEQ ID NO: 43955 - DNA, 45 bp, Emericella nidulans
gttctcgagacgagcgatcgcttagttctcacccttctcgctccc

SEQ ID NO: 43956 - DNA, 43 bp, Emericella nidulans
gaattcactgcggccgccatgcggtggctcagcaaacttctcg

SEQ ID NO: 43957 - DNA, 46 bp, Emericella nidulans
gttctcgagacgagcgatcgcctaggagctcatggtgctgttgtgc

SEQ ID NO: 43958 - DNA, 48 bp, Emericella nidulans
gaattcactgcggccgccatggcggatcttcagtctatcgcccagctc

SEQ ID NO: 43959 - DNA, 47 bp, Emericella nidulans
gttctcgagacgagcgatcgctcacgcaatataactgctgagcatcg

SEQ ID NO: 43960 - DNA, 52 bp, Emericella nidulans
gaattcactgcggccgccatgcacctctcccatattcttgttatgttctcca

SEQ ID NO: 43961 - DNA, 51 bp, Emericella nidulans
gttctcgagacgagcgatcgcctaactgcatttcggtcggattttcagtcc

SEQ ID NO: 43962 - DNA, 48 bp, Emericella nidulans
gaattcactgcggccgccatggatagcaatgtttcagagctagtcgag

SEQ ID NO: 43963 - DNA, 53 bp, Emericella nidulans
gttctcgagacgagcgatcgcttaatccaagttagaacaagactcaagtatca

SEQ ID NO: 43964 - DNA, 46 bp, Emericella nidulans
gaattcactgcggccgccatggcgctcgacaactactaccgcaaca

SEQ ID NO: 43965 - DNA, 52 bp, Emericella nidulans
gttctcgagacgagcgatcgcctacttgaacaacttcgacacagctacctcc

SEQ ID NO: 43966 - DNA, 39 bp, Emericella nidulans
gaattcactgcggccgccatgcctcaggcgggaaagtcc

SEQ ID NO: 43967 - DNA, 45 bp, Emericella nidulans
gttctcgagacgagcgatcgcttatattgcccctgtggagttctt

SEQ ID NO: 43968 - DNA, 45 bp, Emericella nidulans
gaattcactgcggccgccatgtcggccttccattcgacaggggtc

SEQ ID NO: 43969 - DNA, 46 bp, Emericella nidulans
gttctcgagacgagcgatcgcttacggaccggtcaacaaggcagga

SEQ ID NO: 43970 - DNA, 44 bp, Emericella nidulans
gaattcactgcggccgccatggttgctgctgttttctttggtat

SEQ ID NO: 43971 - DNA, 50 bp, Emericella nidulans
gttctcgagacgagcgatcgcttagttgtttaagttcgtaaggtacgatg

SEQ ID NO: 43972 - DNA, 39 bp, Emericella nidulans
gaattcactgcggccgccatgcttctactggcgcggatg

SEQ ID NO: 43973 - DNA, 45 bp, Emericella nidulans
gttctcgagacgagcgatcgcttacagtagaggcacaggctggat

SEQ ID NO: 43974 - DNA, 45 bp, Emericella nidulans
gaattcactgcggccgccatgtgagtctttctacaactggctttg

SEQ ID NO: 43975 - DNA, 40 bp, Emericella nidulans
gttctcgagacgagcgatcgcctatatacccgagccatgc

SEQ ID NO: 43976 - DNA, 45 bp, Emericella nidulans
gaattcactgcggccgccatggccgtcatggagattgccgagtat

SEQ ID NO: 43977 - DNA, 47 bp, Emericella nidulans
gttctcgagacgagcgatcgcctacctattctcttcaacccgccgta

SEQ ID NO: 43978 - DNA, 45 bp, Emericella nidulans
gaattcactgcggccgccatgggcccgtcacgaaaggaaaacttc

SEQ ID NO: 43979 - DNA, 45 bp, Emericella nidulans
gttctcgagacgagcgatcgctcaccagtcgtcgtcgtcatcctg

SEQ ID NO: 43980 - DNA, 45 bp, Emericella nidulans
gaattcactgcggccgccatgctgaagttgaagtcgcgcccaaaa

SEQ ID NO: 43981 - DNA, 51 bp, Emericella nidulans
gttctcgagacgagcgatcgctcagtgtcttcttcttggatgctgtagagg

SEQ ID NO: 43982 - DNA, 45 bp, Emericella nidulans
gaattcactgcggccgccatgagattcccatcggacaaccggaac

SEQ ID NO: 43983 - DNA, 46 bp, Emericella nidulans
gttctcgagacgagcgatcgctcatgtctgggacagaacctcctca

SEQ ID NO: 43984 - DNA, 45 bp, Emericella nidulans
gaattcactgcggccgccatgacttcatatttgccgcgccaggtg

SEQ ID NO: 43985 - DNA, 47 bp, Emericella nidulans
gttctcgagacgagcgatcgcctactcctctgccttcttcgaagcct

SEQ ID NO: 43986 - DNA, 45 bp, Emericella nidulans
gaattcactgcggccgccatggcactttgactgccccctgcttac

SEQ ID NO: 43987 - DNA, 49 bp, Emericella nidulans
gttctcgagacgagcgatcgcctaagagccttcagaacccctagcctga

SEQ ID NO: 43988 - DNA, 45 bp, Emericella nidulans
gaattcactgcggccgccatgcgcttttcatggtctgcgcacttt

SEQ ID NO: 43989 - DNA, 45 bp, Emericella nidulans
gttctcgagacgagcgatcgctcacttcttcctccgtccattcca

SEQ ID NO: 43990 - DNA, 47 bp, Emericella nidulans
gaattcactgcggccgccatgcccaatccgttcaatacagaccgatg

SEQ ID NO: 43991 - DNA, 50 bp, Emericella nidulans
gttctcgagacgagcgatcgcttaacggatgatagaggccaacggccaaa

SEQ ID NO: 43992 - DNA, 45 bp, Emericella nidulans
gaattcactgcggccgccatgtaagaacgtgcaccttgccccctc

SEQ ID NO: 43993 - DNA, 51 bp, Emericella nidulans
gttctcgagacgagcgatcgcctaagcatcaatcataagctgctccccttc

SEQ ID NO: 43994 - DNA, 45 bp, Emericella nidulans
gaattcactgcggccgccatgtctttgcgaagttggctgcgttct

SEQ ID NO: 43995 - DNA, 45 bp, Emericella nidulans
gttctcgagacgagcgatcgcctagctggtcgaggggcgatgttc

SEQ ID NO: 43996 - DNA, 45 bp, Emericella nidulans
gaattcactgcggccgccatgcaacaccgtcgcaaacacatcctc

SEQ ID NO: 43997 - DNA, 54 bp, Emericella nidulans
gttctcgagacgagcgatcgcctatatcgcaacgaagaagctcttttccccttc

SEQ ID NO: 43998 - DNA, 42 bp, Emericella nidulans
gaattcactgcggccgccatgcagctttgccggccactcctt

SEQ ID NO: 43999 - DNA, 45 bp, Emericella nidulans
gttctcgagacgagcgatcgctcaggatgaagccgcagtagtacc

SEQ ID NO: 44000 - DNA, 45 bp, Emericella nidulans
gaattcactgcggccgccatggcccacagggaacgttactggacc

SEQ ID NO: 44001 - DNA, 53 bp, Emericella nidulans
gttctcgagacgagcgatcgcttacttctccaatctcttctttttctctgcaa

SEQ ID NO: 44002 - DNA, 45 bp, Emericella nidulans
gaattcactgcggccgccatgaccttggggtcttgccggatgaag

SEQ ID NO: 44003 - DNA, 52 bp, Emericella nidulans
gttctcgagacgagcgatcgcttatgacttctgctcctcgacaaatttgagt

SEQ ID NO: 44004 - DNA, 45 bp, Emericella nidulans
gaattcactgcggccgccatgttgcagtctggcaagaccaccatc

SEQ ID NO: 44005 - DNA, 45 bp, Emericella nidulans
gttctcgagacgagcgatcgcctacaggagagcggtccgaattgc

SEQ ID NO: 44006 - DNA, 45 bp, Emericella nidulans
gaattcactgcggccgccatgcgcaatcttcttctcgcggtcaag

SEQ ID NO: 44007 - DNA, 51 bp, Emericella nidulans
gttctcgagacgagcgatcgctcaaacttcgatatcaactgtgatgccttc

SEQ ID NO: 44008 - DNA, 45 bp, Emericella nidulans
gaattcactgcggccgccatgtttgacgtcgcgatgcagagactt

SEQ ID NO: 44009 - DNA, 47 bp, Emericella nidulans
gttctcgagacgagcgatcgcctaaggcgccatgatcagttcaatca

SEQ ID NO: 44010 - DNA, 49 bp, Emericella nidulans
gaattcactgcggccgccatggctcaagttggactcaaagcaagactcg

SEQ ID NO: 44011 - DNA, 45 bp, Emericella nidulans
gttctcgagacgagcgatcgctcaaacatcgatcatttcggcatc

SEQ ID NO: 44012 - DNA, 46 bp, Emericella nidulans
gaattcactgcggccgccatgaatatccaacaccagacatcgcaga

SEQ ID NO: 44013 - DNA, 47 bp, Emericella nidulans
gttctcgagacgagcgatcgcttagtgatgggagtggattcggttgg

SEQ ID NO: 44014 - DNA, 45 bp, Emericella nidulans
gaattcactgcggccgccatgtgaggacgagaccgatagcatccc

SEQ ID NO: 44015 - DNA, 46 bp, Emericella nidulans
gttctcgagacgagcgatcgctcagcgtaaatgatttgccccttca

SEQ ID NO: 44016 - DNA, 50 bp, Emericella nidulans
gaattcactgcggccgccatgccacgatgttcccataactatgagcgata

SEQ ID NO: 44017 - DNA, 49 bp, Emericella nidulans
gttctcgagacgagcgatcgctcacttcttccaaaacatagccttctgc

SEQ ID NO: 44018 - DNA, 44 bp, Emericella nidulans
gaattcactgcggccgccatgcttacggtgctggccctctctcg

SEQ ID NO: 44019 - DNA, 50 bp, Emericella nidulans
gttctcgagacgagcgatcgctcacatacgagcgatcttacctggccata

SEQ ID NO: 44020 - DNA, 50 bp, Emericella nidulans
gaattcactgcggccgccatgaggttatggagaagttcgattacatcgtt

SEQ ID NO: 44021 - DNA, 49 bp, Emericella nidulans
gttctcgagacgagcgatcgcttagaactgtgagattgccactgcgaca

SEQ ID NO: 44022 - DNA, 48 bp, Emericella nidulans
gaattcactgcggccgccatgtcccagggtgtttctcaatgtatcgaa

SEQ ID NO: 44023 - DNA, 51 bp, Emericella nidulans
gttctcgagacgagcgatcgcctagtagatatcgttagcagtccgcgcatc

SEQ ID NO: 44024 - DNA, 45 bp, Emericella nidulans
gaattcactgcggccgccatgtgtgcggtttttgctgcttcagta

SEQ ID NO: 44025 - DNA, 57 bp, Emericella nidulans
gttctcgagacgagcgatcgcctaaatgggtctatgcttaccagaattgatatacgg

SEQ ID NO: 44026 - DNA, 51 bp, Emericella nidulans
gaattcactgcggccgccatggctgcttcagtatgagatttgtggtcttca

SEQ ID NO: 44027 - DNA, 43 bp, Emericella nidulans
gttctcgagacgagcgatcgctcacaggttgcccgataacacg

SEQ ID NO: 44028 - DNA, 48 bp, Emericella nidulans; identical to SEQ ID NO: 44022

SEQ ID NO: 44029 - DNA, 51 bp, Emericella nidulans; identical to SEQ ID NO: 44023

SEQ ID NO: 44030 - DNA, 48 bp, Emericella nidulans
gaattcactgcggccgccatggcattgaatacctcaaggacgttgttc

SEQ ID NO: 44031 - DNA, 54 bp, Emericella nidulans
gttctcgagacgagcgatcgcctaccagtctattgtgtttgaaggagaccgagt

SEQ ID NO: 44032 - DNA, 57 bp, Emericella nidulans
gaattcactgcggccgccatgatcctaatgttttagaattgtttgttggagtaaagg

SEQ ID NO: 44033 - DNA, 44 bp, Emericella nidulans
gttctcgagacgagcgatcgctcagcccccaatgctcaaaggtg

SEQ ID NO: 44034 - DNA, 45 bp, Emericella nidulans
gaattcactgcggccgccatgtcggtgaactccgtggtggttctt

SEQ ID NO: 44035 - DNA, 51 bp, Emericella nidulans
gttctcgagacgagcgatcgcctagttggatccgaggtatttgagaatgga

SEQ ID NO: 44036 - DNA, 39 bp, Emericella nidulans
gaattcactgcggccgccatgcctcgcaaatttttcgtt

SEQ ID NO: 44037 - DNA, 39 bp, Emericella nidulans
gttctcgagacgagcgatcgcttacaggcgggcattgac

SEQ ID NO: 44038 - DNA, 50 bp, Emericella nidulans
gaattcactgcggccgccatgtttttagaaatattaaaaggacacattct

SEQ ID NO: 44039 - DNA, 48 bp, Emericella nidulans
gttctcgagacgagcgatcgcttatccttccatttgatctcttaatca

SEQ ID NO: 44040 - DNA, 45 bp, Emericella nidulans
gaattcactgcggccgccatggaaactcaaaatgagttcgatgac

SEQ ID NO: 44041 - DNA, 44 bp, Emericella nidulans
gttctcgagacgagcgatcgctcaatcattctctaaatccttcg

SEQ ID NO: 44042 - DNA, 45 bp, Emericella nidulans
gaattcactgcggccgccatgactgcagacatggaaactcaaaat

SEQ ID NO: 44043 - DNA, 44 bp, Emericella nidulans; identical to SEQ ID NO: 44041

SEQ ID NO: 44044 - DNA, 42 bp, Emericella nidulans
gaattcactgcggccgccatggcccagcaaaagaagacaatc

SEQ ID NO: 44045 - DNA, 39 bp, Emericella nidulans
gttctcgagacgagcgatcgctcacagcatccagtccag

SEQ ID NO: 44046 - DNA, 46 bp, Emericella nidulans
gaattcactgcggccgccatgtcgaataaaaagatagagcagtggg

SEQ ID NO: 44047 - DNA, 39 bp, Emericella nidulans
gttctcgagacgagcgatcgctcaaaccatcgacctgct

SEQ ID NO: 44048 - DNA, 41 bp, Emericella nidulans
gaattcactgcggccgccatggcttcgtggttacaaatccc

SEQ ID NO: 44049 - DNA, 40 bp, Emericella nidulans
gttctcgagacgagcgatcgctcacagatccagctgcaca

SEQ ID NO: 44050 - DNA, 41 bp, Emericella nidulans; identical to SEQ ID NO: 44048

SEQ ID NO: 44051 - DNA, 40 bp, Emericella nidulans; identical to SEQ ID NO: 44049

SEQ ID NO: 44052 - DNA, 45 bp, Emericella nidulans
gaattcactgcggccgccatgcctagggagattatcacaatccaa

SEQ ID NO: 44053 - DNA, 45 bp, Emericella nidulans
gttctcgagacgagcgatcgcttatactccaacttcatcctttcc

SEQ ID NO: 44054 - DNA, 47 bp, Emericella nidulans
gaattcactgcggccgccatggcttctacactcagacttagtacctc

SEQ ID NO: 44055 - DNA, 43 bp, Emericella nidulans
gttctcgagacgagcgatcgcttatagcttagcgccaacaagc

SEQ ID NO: 44056 - DNA, 40 bp, Emericella nidulans
gaattcactgcggccgccatggagccgacatttgacatcc

SEQ ID NO: 44057 - DNA, 46 bp, Emericella nidulans
gttctcgagacgagcgatcgctcaattaaacacagaggtactgagg

SEQ ID NO: 44058 - DNA, 42 bp, Emericella nidulans
gaattcactgcggccgccatggccaaggaagtggactacacg

SEQ ID NO: 44059 - DNA, 43 bp, Emericella nidulans
gttctcgagacgagcgatcgcctaatcactatcatcgctgtcg

SEQ ID NO: 44060 - DNA, 42 bp, Emericella nidulans
gaattcactgcggccgccatgcctcaatcctgggaagaactg

SEQ ID NO: 44061 - DNA, 42 bp, Emericella nidulans
gttctcgagacgagcgatcgcctatggagtcaccacatttcc

SEQ ID NO: 44062 - DNA, 45 bp, Emericella nidulans
gaattcactgcggccgccatgaagacgttgcaatatttgctcaag

SEQ ID NO: 44063 - DNA, 41 bp, Emericella nidulans
gttctcgagacgagcgatcgctcaatagtccggccagtcag

SEQ ID NO: 44064 - DNA, 41 bp, Emericella nidulans
gaattcactgcggccgccatgtctaccgaggataatcacga

SEQ ID NO: 44065 - DNA, 47 bp, Emericella nidulans
gttctcgagacgagcgatcgcttaactctgaaagctgtacatccgta

SEQ ID NO: 44066 - DNA, 43 bp, Emericella nidulans
gaattcactgcggccgccatgactgagcccatgctatttaagc

SEQ ID NO: 44067 - DNA, 45 bp, Emericella nidulans
gttctcgagacgagcgatcgcctactcatccttcacgttctcctc

SEQ ID NO: 44068 - DNA, 43 bp, Emericella nidulans
gaattcactgcggccgccatgtctgctgaaacttctaccaccc

SEQ ID NO: 44069 - DNA, 45 bp, Emericella nidulans
gttctcgagacgagcgatcgctcatgtactcgtcataaacgctaa

SEQ ID NO: 44070 - DNA, 43 bp, Emericella nidulans
gaattcactgcggccgccatgtctacaaccgtcacacaagtgc

SEQ ID NO: 44071 - DNA, 49 bp, Emericella nidulans
gttctcgagacgagcgatcgcctagaagtaatgaaggttctcctctttc

SEQ ID NO: 44072 - DNA, 43 bp, Emericella nidulans
gaattcactgcggccgccatgtttttccttgccgagtcaccgt

SEQ ID NO: 44073 - DNA, 43 bp, Emericella nidulans
gttctcgagacgagcgatcgctcatacccgtggacaatgttgc

SEQ ID NO: 44074 - DNA, 42 bp, Emericella nidulans
gaattcactgcggccgccatgcctcccaaagctgccgagaag

SEQ ID NO: 44075 - DNA, 47 bp, Emericella nidulans
gttctcgagacgagcgatcgcctatttggcagatgaggaatacttcg

SEQ ID NO: 44076 - DNA, 42 bp, Emericella nidulans; identical to SEQ ID NO: 44074

SEQ ID NO: 44077 - DNA, 47 bp, Emericella nidulans; identical to SEQ ID NO: 44075

SEQ ID NO: 44078 - DNA, 43 bp, Emericella nidulans
gaattcactgcggccgccatggccgactctctgaccgaagagc

SEQ ID NO: 44079 - DNA, 47 bp, Emericella nidulans
gttctcgagacgagcgatcgcttatttttgcatcataagttggacga

SEQ ID NO: 44080 - DNA, 47 bp, Emericella nidulans
gaattcactgcggccgccatggaaaaatcaatcctcctcatcaatgg

SEQ ID NO: 44081 - DNA, 45 bp, Emericella nidulans
gttctcgagacgagcgatcgcttaaagagcagcctttttctccag

SEQ ID NO: 44082 - DNA, 47 bp, Emericella nidulans; identical to SEQ ID NO: 44080

SEQ ID NO: 44083 - DNA, 45 bp, Emericella nidulans; identical to SEQ ID NO: 44081

SEQ ID NO: 44084 - DNA, 45 bp, Emericella nidulans
gaattcactgcggccgccatggccgagaaaatgcttgttatgacc

SEQ ID NO: 44085 - DNA, 41 bp, Emericella nidulans
gttctcgagacgagcgatcgctcactcctcggcccattcgt

SEQ ID NO: 44086 - DNA, 46 bp, Emericella nidulans
gaattcactgcggccgccatgtctctgttcagaaccattcctaccc

SEQ ID NO: 44087 - DNA, 50 bp, Emericella nidulans
gttctcgagacgagcgatcgcttactgaatggtgatctttttagcagtcg

SEQ ID NO: 44088 - DNA, 42 bp, Emericella nidulans
gaattcactgcggccgccatggccacaaacatcacccaccac

SEQ ID NO: 44089 - DNA, 49 bp, Emericella nidulans
gttctcgagacgagcgatcgcctaagcatcaagcaacttcttgctatcc

SEQ ID NO: 44090 - DNA, 50 bp, Emericella nidulans
gaattcactgcggccgccatggtctccttcaaatctctcctagttctctg

SEQ ID NO: 44091 - DNA, 49 bp, Emericella nidulans
gttctcgagacgagcgatcgcctagtaaacagtaatagaagccgaccca

SEQ ID NO: 44092 - DNA, 48 bp, Emericella nidulans
gaattcactgcggccgccatgtctacaaattcagacctcagagtgaca

SEQ ID NO: 44093 - DNA, 48 bp, Emericella nidulans
gttctcgagacgagcgatcgctcaacacctgaattccgttggtgtatc

SEQ ID NO: 44094 - DNA, 44 bp, Emericella nidulans
gaattcactgcggccgccatgccatctgcagccgtttctgtacc

SEQ ID NO: 44095 - DNA, 42 bp, Emericella nidulans
gttctcgagacgagcgatcgcctaccagggcacgtctgagcc

SEQ ID NO: 44096 - DNA, 41 bp, Emericella nidulans
gaattcactgcggccgccatggagcaagcccagcagacttc

SEQ ID NO: 44097 - DNA, 41 bp, Emericella nidulans
gttctcgagacgagcgatcgctcactgctgcgggggtaaat

SEQ ID NO: 44098 - DNA, 45 bp, Emericella nidulans
gaattcactgcggccgccatgtcttcgaagtcccacctcccctac

SEQ ID NO: 44099 - DNA, 48 bp, Emericella nidulans
gttctcgagacgagcgatcgctcaaagtccaactcttttctcgtaagc

SEQ ID NO: 44100 - DNA, 42 bp, Emericella nidulans
gaattcactgcggccgccatggagccaatcaccattcccacc

SEQ ID NO: 44101 - DNA, 46 bp, Emericella nidulans
gttctcgagacgagcgatcgcctacaaatttgacttcgaccgctca

SEQ ID NO: 44102 - DNA, 41 bp, Emericella nidulans
gaattcactgcggccgccatgtgcatccccactatgcaatg

SEQ ID NO: 44103 - DNA, 49 bp, Emericella nidulans
gttctcgagacgagcgatcgcttattctggcatctctagcacataacga

SEQ ID NO: 44104 - DNA, 41 bp, Emericella nidulans
gaattcactgcggccgccatggagccgacatttgacatccc

SEQ ID NO: 44105 - DNA, 44 bp, Emericella nidulans
gttctcgagacgagcgatcgcgcttgggaagcgttcggtattgt

SEQ ID NO: 44106 - DNA, 48 bp, Emericella nidulans
gaattcactgcggccgccatggcatcgaatcaatttaccattacatcg

SEQ ID NO: 44107 - DNA, 44 bp, Emericella nidulans
gttctcgagacgagcgatcgcttatttcgcgccttttcccttag

SEQ ID NO: 44108 - DNA, 45 bp, Emericella nidulans
gaattcactgcggccgccatggaagaggaagttgctgctctcgtt

SEQ ID NO: 44109 - DNA, 42 bp, Emericella nidulans
gttctcgagacgagcgatcgcttagaagcacttgcggtggac

SEQ ID NO: 44110 - DNA, 43 bp, Emericella nidulans
gaattcactgcggccgccatggccttcttcttcaatcggggtc

SEQ ID NO: 44111 - DNA, 43 bp, Emericella nidulans
gttctcgagacgagcgatcgctctacgcaacagtcgtggtgtt

SEQ ID NO: 44112 - DNA, 41 bp, Emericella nidulans
gaattcactgcggccgccatgtccgccacggatcctactcc

SEQ ID NO: 44113 - DNA, 42 bp, Emericella nidulans
gttctcgagacgagcgatcgcttagagcccttgagcaggcac

SEQ ID NO: 44114 - DNA, 42 bp, Emericella nidulans
gaattcactgcggccgccatgcgaaatcagtccagcctgtcc

SEQ ID NO: 44115 - DNA, 42 bp, Emericella nidulans
gttctcgagacgagcgatcgctcattcatcccagccgtccag

SEQ ID NO: 44116 - DNA, 40 bp, Emericella nidulans
gaattcactgcggccgccatgtccgacccttcaccgaaac

SEQ ID NO: 44117 - DNA, 45 bp, Emericella nidulans
gttctcgagacgagcgatcgcctaagcactccggacaactttgaa

SEQ ID NO: 44118 - DNA, 40 bp, Emericella nidulans; identical to SEQ ID NO: 44116

SEQ ID NO: 44119 - DNA, 45 bp, Emericella nidulans
gttctcgagacgagcgatcgcctaagcaccccggacaactttgaa

SEQ ID NO: 44120 - DNA, 44 bp, Emericella nidulans
gaattcactgcggccgccatgtcggcttccagtacgctgaaaaa

SEQ ID NO: 44121 - DNA, 51 bp, Emericella nidulans
gttctcgagacgagcgatcgctcatccataaccatattccttcattacttg

SEQ ID NO: 44122 - DNA, 41 bp, Emericella nidulans; identical to SEQ ID NO: 44104

SEQ ID NO: 44123 - DNA, 42 bp, Emericella nidulans
gttctcgagacgagcgatcgctcaatgcggcgttttatgggt

SEQ ID NO: 44124 - DNA, 45 bp, Emericella nidulans
gaattcactgcggccgccatgcgtgagatcgttcaccttcagacc

SEQ ID NO: 44125 - DNA, 46 bp, Emericella nidulans
gttctcgagacgagcgatcgcttattcctcaccctccatgatctcc

SEQ ID NO: 44126 - DNA, 45 bp, Emericella nidulans
gaattcactgcggccgccatgcgtgagattgttcatctccagacc

SEQ ID NO: 44127 - DNA, 46 bp, Emericella nidulans
gttctcgagacgagcgatcgcctactcctcctgctcatatgcctcc

SEQ ID NO: 44128 - DNA, 41 bp, Emericella nidulans; identical to SEQ ID NO: 44104

SEQ ID NO: 44129 - DNA, 42 bp, Emericella nidulans; identical to SEQ ID NO: 44123

SEQ ID NO: 44130 - DNA, 45 bp, Emericella nidulans
gaattcactgcggccgccatgtctgatttgttcaccaccatcgag

SEQ ID NO: 44131 - DNA, 44 bp, Emericella nidulans
gttctcgagacgagcgatcgcttaagcgaaaagagcatcaccca

SEQ ID NO: 44132 - DNA, 40 bp, Emericella nidulans
gaattcactgcggccgccatgcccggcgttgagaaatcct

SEQ ID NO: 44133 - DNA, 50 bp, Emericella nidulans
gttctcgagacgagcgatcgcctactgtgacgaagtctctagctttgacg

SEQ ID NO: 44134 - DNA, 49 bp, Emericella nidulans
gaattcactgcggccgccatgattctgcctctgatattggtcttgtatc

SEQ ID NO: 44135 - DNA, 49 bp, Emericella nidulans
gttctcgagacgagcgatcgcttagtaaagcaataagctgtacagtggc

SEQ ID NO: 44136 - DNA, 42 bp, Emericella nidulans
gaattcactgcggccgccatggccgacattgctacaagggac

SEQ ID NO: 44137 - DNA, 48 bp, Emericella nidulans
gttctcgagacgagcgatcgctcaacctaactgctcaaaattagcatc

SEQ ID NO: 44138 - DNA, 54 bp, Emericella nidulans
gaattcactgcggccgccatggttatctttctcttgaaactcaggaataaaagc

SEQ ID NO: 44139 - DNA, 46 bp, Emericella nidulans
gttctcgagacgagcgatcgcctaagcctgcttgctctgatactcc

SEQ ID NO: 44140 - DNA, 46 bp, Emericella nidulans
gaattcactgcggccgccatggcctcaaatatcctccagattccct

SEQ ID NO: 44141 - DNA, 42 bp, Emericella nidulans
gttctcgagacgagcgatcgcttagaggtgtccgcagggttg

SEQ ID NO: 44142 - DNA, 41 bp, Emericella nidulans
gaattcactgcggccgccatggaagctccccgctcacatcc

SEQ ID NO: 44143 - DNA, 49 bp, Emericella nidulans
gttctcgagacgagcgatcgctcaatattcattcaaccgtagcttcttg

SEQ ID NO: 44144 - DNA, 44 bp, Emericella nidulans
gaattcactgcggccgccatgtctagaacctctagcgccccctc

SEQ ID NO: 44145 - DNA, 45 bp, Emericella nidulans
gttctcgagacgagcgatcgcctatccattccccaatctccactc

SEQ ID NO: 44146 - DNA, 47 bp, Emericella nidulans
gaattcactgcggccgccatggcccctaaactgtttaccttcgtttc

SEQ ID NO: 44147 - DNA, 45 bp, Emericella nidulans
gttctcgagacgagcgatcgcttacaaaacagcaagcagggagag

SEQ ID NO: 44148 - DNA, 42 bp, Emericella nidulans
gaattcactgcggccgccatgttggtggatgcacccgagaat

SEQ ID NO: 44149 - DNA, 50 bp, Emericella nidulans
gttctcgagacgagcgatcgcttagtagcataccttccactcctgtaaga

SEQ ID NO: 44150 - DNA, 43 bp, Emericella nidulans
gaattcactgcggccgccatggcggagcggaagatttcctatg

SEQ ID NO: 44151 - DNA, 43 bp, Emericella nidulans
gttctcgagacgagcgatcgcttactcatcgtcctcaggctca

SEQ ID NO: 44152 - DNA, 43 bp, Emericella nidulans; identical to SEQ ID NO: 44150

SEQ ID NO: 44153 - DNA, 43 bp, Emericella nidulans; identical to SEQ ID NO: 44151

SEQ ID NO: 44154 - DNA, 48 bp, Emericella nidulans
gaattcactgcggccgccatgtctgactttgctcgcaaggatttctcc

SEQ ID NO: 44155 - DNA, 53 bp, Emericella nidulans
gttctcgagacgagcgatcgcttaccttatcgccaatagactaggggtactgc

SEQ ID NO: 44156 - DNA, 45 bp, Emericella nidulans
gaattcactgcggccgccatgcatcggacgcagagcttggattac

SEQ ID NO: 44157 - DNA, 53 bp, Emericella nidulans
gttctcgagacgagcgatcgcctaacgactcggcttaatatcatctgttttcg

SEQ ID NO: 44158 - DNA, 48 bp, Emericella nidulans
gaattcactgcggccgccatggcttccgagaagaaggacaagctcgaa

SEQ ID NO: 44159 - DNA, 54 bp, Emericella nidulans
gttctcgagacgagcgatcgcttattgtgtcttgaataaaaggatagcgcagtg

SEQ ID NO: 44160 - DNA, 45 bp, Emericella nidulans
gaattcactgcggccgccatgtctggacgtggaaaaggtggcaag

SEQ ID NO: 44161 - DNA, 46 bp, Emericella nidulans
gttctcgagacgagcgatcgcctagccaccgaaaccgtagagggtg

SEQ ID NO: 44162 - DNA, 41 bp, Emericella nidulans
gaattcactgcggccgccatgtctggacgcggaaagggtgg

SEQ ID NO: 44163 - DNA, 47 bp, Emericella nidulans
gttctcgagacgagcgatcgcttaaccaccgaaaccgtagagggtgc

SEQ ID NO: 44164 - DNA, 42 bp, Emericella nidulans
gaattcactgcggccgccatgtctggacgcggaaaaggtggc

SEQ ID NO: 44165 - DNA, 46 bp, Emericella nidulans; identical to SEQ ID NO: 44161

SEQ ID NO: 44166 - DNA, 48 bp, Emericella nidulans
gaattcactgcggccgccatggctaagggcggtgacagctactctcct

SEQ ID NO: 44167 - DNA, 51 bp, Emericella nidulans
gttctcgagacgagcgatcgcttaagcagtgctctccttgaggtaggtgat

SEQ ID NO: 44168 - DNA, 42 bp, Emericella nidulans
gaattcactgcggccgccatgactggcggcaaatctggtggc

SEQ ID NO: 44169 - DNA, 45 bp, Emericella nidulans
gttctcgagacgagcgatcgcttacagctcctggctgccctttcc

SEQ ID NO: 44170 - DNA, 46 bp, Emericella nidulans
gaattcactgcggccgccatggctcgcactaagcagactgcccgta

SEQ ID NO: 44171 - DNA, 44 bp, Emericella nidulans
gttctcgagacgagcgatcgcttaagatcgctcaccacggaggc

SEQ ID NO: 44172 - DNA, 44 bp, Emericella nidulans
gaattcactgcggccgccatgggtggtgtcaccgttcgcgatgt

SEQ ID NO: 44173 - DNA, 48 bp, Emericella nidulans
gttctcgagacgagcgatcgcttactcgtcatcctcctcctcctcgtc

SEQ ID NO: 44174 - DNA, 46 bp, Emericella nidulans
gaattcactgcggccgccatggtaaacaccggtcttccagcagggt

SEQ ID NO: 44175 - DNA, 49 bp, Emericella nidulans
gttctcgagacgagcgatcgcctattgtagccgctcgatgagatgaaga

SEQ ID NO: 44176 - DNA, 45 bp, Emericella nidulans
gaattcactgcggccgccatgaacctcacttctaccgccgctctc

SEQ ID NO: 44177 - DNA, 54 bp, Emericella nidulans
gttctcgagacgagcgatcgcttaagaggagtaagtgcaagcaatagggttctc

SEQ ID NO: 44178 - DNA, 45 bp, Emericella nidulans
gaattcactgcggccgccatgatcggcttcactcggactctgcat

SEQ ID NO: 44179 - DNA, 46 bp, Emericella nidulans
gttctcgagacgagcgatcgcactggcaaccagagggttcagaaga

SEQ ID NO: 44180 - DNA, 44 bp, Emericella nidulans
gaattcactgcggccgccatgccgttcggcactctgtacactcg

SEQ ID NO: 44181 - DNA, 46 bp, Emericella nidulans
gttctcgagacgagcgatcgctcacttaggcggctgaatcggcatt

SEQ ID NO: 44182 - DNA, 44 bp, Emericella nidulans; identical to SEQ ID NO: 44180

SEQ ID NO: 44183 - DNA, 46 bp, Emericella nidulans; identical to SEQ ID NO: 44181

SEQ ID NO: 44184 - DNA, 46 bp, Emericella nidulans
gaattcactgcggccgccatgtttgactacgacggcacccttaccc

SEQ ID NO: 44185 - DNA, 50 bp, Emericella nidulans
gttctcgagacgagcgatcgctcaaatttcttcaaggcacggaacatatc

SEQ ID NO: 44186 - DNA, 44 bp, Emericella nidulans
gaattcactgcggccgccatgctgtccgccgcccgcagatttat

SEQ ID NO: 44187 - DNA, 50 bp, Emericella nidulans
gttctcgagacgagcgatcgctcacattttcgctctcttcgagttcttcc

SEQ ID NO: 44188 - DNA, 47 bp, Emericella nidulans
gaattcactgcggccgccatggactcgctcactactcatcctgccac

SEQ ID NO: 44189 - DNA, 47 bp, Emericella nidulans
gttctcgagacgagcgatcgcttagaccttgcggaaatcagagagca

SEQ ID NO: 44190 - DNA, 44 bp, Emericella nidulans
gaattcactgcggccgccatggcgactaacgccagatacgagcc

SEQ ID NO: 44191 - DNA, 55 bp, Emericella nidulans
gttctcgagacgagcgatcgctcagttgttattctggttattcaaaatccgtagg

SEQ ID NO: 44192 - DNA, 46 bp, Emericella nidulans
gaattcactgcggccgccatgccttcctatgcggttctgggggcta

SEQ ID NO: 44193 - DNA, 50 bp, Emericella nidulans
gttctcgagacgagcgatcgcctaagcttgcttgtccctctcctttctcg

SEQ ID NO: 44194 - DNA, 48 bp, Emericella nidulans
gaattcactgcggccgccatgcagggatggaagacgatagtcggcaag

SEQ ID NO: 44195 - DNA, 53 bp, Emericella nidulans
gttctcgagacgagcgatcgcttactcacaaacccagcatattccacttaaca

SEQ ID NO: 44196 - DNA, 45 bp, Emericella nidulans
gaattcactgcggccgccatgccttcgtacgcccttctaggagcc

SEQ ID NO: 44197 - DNA, 55 bp, Emericella nidulans
gttctcgagacgagcgatcgcctaggctttgatactatatagcagacccccaagc

SEQ ID NO: 44198 - DNA, 49 bp, Emericella nidulans
gaattcactgcggccgccatgatgttcagccgatttttcaaggcggtcc

SEQ ID NO: 44199 - DNA, 43 bp, Emericella nidulans
gttctcgagacgagcgatcgcagcaagggccaagagctggtga

SEQ ID NO: 44200 - DNA, 48 bp, Emericella nidulans
gaattcactgcggccgccatgttgctcaagagcatccagaacattgtc

SEQ ID NO: 44201 - DNA, 54 bp, Emericella nidulans
gttctcgagacgagcgatcgctcagaaagatagatgtctatcaagcacgaaacg

SEQ ID NO: 44202 - DNA, 46 bp, Emericella nidulans
gaattcactgcggccgccatggataagtcgcaacagcccagctcgt

SEQ ID NO: 44203 - DNA, 46 bp, Emericella nidulans
gttctcgagacgagcgatcgcctaatacgcttgttgcggtggcatc

SEQ ID NO: 44204 - DNA, 46 bp, Emericella nidulans
gaattcactgcggccgccatgacttcgccctcgactatcaagcaga

SEQ ID NO: 44205 - DNA, 48 bp, Emericella nidulans
gttctcgagacgagcgatcgcctagagcagggtatctcccaacgcact

SEQ ID NO: 44206 - DNA, 44 bp, Emericella nidulans
gaattcactgcggccgccatggccgatcaggacgtggatctgga

SEQ ID NO: 44207 - DNA, 47 bp, Emericella nidulans
gttctcgagacgagcgatcgcttacttcttttgctttcgcggaggag

SEQ ID NO: 44208 - DNA, 45 bp, Emericella nidulans
gaattcactgcggccgccatgaggttcacccctctcttcctgctg

SEQ ID NO: 44209 - DNA, 52 bp, Emericella nidulans
gttctcgagacgagcgatcgcttacaatttctgtccggctgtacccggaatc

SEQ ID NO: 44210 - DNA, 41 bp, Emericella nidulans
gaattcactgcggccgccatggactgccccatcccgcaaac

SEQ ID NO: 44211 - DNA, 51 bp, Emericella nidulans
gttctcgagacgagcgatcgcctatgattgtctcgccggtctttcatagtc

SEQ ID NO: 44212 - DNA, 47 bp, Emericella nidulans
gaattcactgcggccgccatgggttcagtcagcaaagccaatgttcc

SEQ ID NO: 44213 - DNA, 52 bp, Emericella nidulans
gttctcgagacgagcgatcgcctaggtctggccgttcttgttgatcaaactc

SEQ ID NO: 44214 - DNA, 43 bp, Emericella nidulans
gaattcactgcggccgccatggctcccaaggtcggaatcaacg

SEQ ID NO: 44215 - DNA, 50 bp, Emericella nidulans
gttctcgagacgagcgatcgcctattgggcatcaaccttggagatgtagg

SEQ ID NO: 44216 - DNA, 43 bp, Emericella nidulans
gaattcactgcggccgccatgaccggcgcatatccaacagcac

SEQ ID NO: 44217 - DNA, 45 bp, Emericella nidulans
gttctcgagacgagcgatcgctcagccatcttcatccgagggacc

SEQ ID NO: 44218 - DNA, 41 bp, Emericella nidulans
gaattcactgcggccgccatggccgacatgagcggcgagca

SEQ ID NO: 44219 - DNA, 46 bp, Emericella nidulans
gttctcgagacgagcgatcgcttaccaggcccagaccttgagcaaa

SEQ ID NO: 44220 - DNA, 50 bp, Emericella nidulans
gaattcactgcggccgccatgggttgtggaatgagtaccgaggataagga

SEQ ID NO: 44221 - DNA, 56 bp, Emericella nidulans
gttctcgagacgagcgatcgcttaaatcagaccacagagtctcaggttctcttgga

SEQ ID NO: 44222 - DNA, 52 bp, Emericella nidulans
gaattcactgcggccgccatgacgatggttattgagaaccagaaccgccagt

SEQ ID NO: 44223 - DNA, 48 bp, Emericella nidulans
gttctcgagacgagcgatcgcttactcttcgtcatcgcctgaacctcc

SEQ ID NO: 44224 - DNA, 50 bp, Emericella nidulans
gaattcactgcggccgccatgcttcacgtaacttgccaaggtaccccctc

SEQ ID NO: 44225 - DNA, 47 bp, Emericella nidulans
gttctcgagacgagcgatcgctcaaatgttggcttggatcgcggact

SEQ ID NO: 44226 - DNA, 45 bp, Emericella nidulans
gaattcactgcggccgccatggcatcccttcgctccgtactcaag

SEQ ID NO: 44227 - DNA, 55 bp, Emericella nidulans
gttctcgagacgagcgatcgcttattcaatttttcccttattgacaacgaaaccc

SEQ ID NO: 44228 - DNA, 43 bp, Emericella nidulans
gaattcactgcggccgccatgacttcgcagcggccaacatcat

SEQ ID NO: 44229 - DNA, 46 bp, Emericella nidulans; identical to SEQ ID NO: 44203

SEQ ID NO: 44230 - DNA, 46 bp, Emericella nidulans
gaattcactgcggccgccatggtcctttatgacggtggctctcacg

SEQ ID NO: 44231 - DNA, 47 bp, Emericella nidulans
gttctcgagacgagcgatcgctcatttcttctcacgctgaccgtagg

SEQ ID NO: 44232 - DNA, 45 bp, Emericella nidulans
gaattcactgcggccgccatggtcgcccccaagtcagaaccccta

SEQ ID NO: 44233 - DNA, 55 bp, Emericella nidulans
gttctcgagacgagcgatcgctcattgacgtgcattattttgctcgtagctgaac

SEQ ID NO: 44234 - DNA, 42 bp, Emericella nidulans
gaattcactgcggccgccatggcagcccctccagcacctcag

SEQ ID NO: 44235 - DNA, 53 bp, Emericella nidulans
gttctcgagacgagcgatcgcctacttccgatccatctgcttgtacccctgct

SEQ ID NO: 44236 - DNA, 45 bp, Emericella nidulans
gaattcactgcggccgccatggtgccctgcagcaaggaaaaggac

SEQ ID NO: 44237 - DNA, 54 bp, Emericella nidulans
gttctcgagacgagcgatcgcttatacactttgaacatccacaggcttgcctcc

SEQ ID NO: 44238 - DNA, 48 bp, Emericella nidulans
gaattcactgcggccgccatggtttctatggtcgaggcctccattttg

SEQ ID NO: 44239 - DNA, 55 bp, Emericella nidulans; identical to SEQ ID NO: 44233

SEQ ID NO: 44240 - DNA, 45 bp, Emericella nidulans
gaattcactgcggccgccatgcattcgttcaagcgctcactcctc

SEQ ID NO: 44241 - DNA, 45 bp, Emericella nidulans
gttctcgagacgagcgatcgcctattcgtcggcaccgttgtaggc

SEQ ID NO: 44242 - DNA, 45 bp, Emericella nidulans
gaattcactgcggccgccatgaagaacgtggttcgccggaagcta

SEQ ID NO: 44243 - DNA, 56 bp, Emericella nidulans
gttctcgagacgagcgatcgcttaacgaagagagaatcccttcctctttccctttt

SEQ ID NO: 44244 - DNA, 51 bp, Emericella nidulans
gaattcactgcggccgccatgtcgaactactcgcattcaagcaataatccc

SEQ ID NO: 44245 - DNA, 53 bp, Emericella nidulans
gttctcgagacgagcgatcgcttatgtagctgtagatggcctcgacgagtatt

SEQ ID NO: 44246 - DNA, 57 bp, Emericella nidulans
gaattcactgcggccgccatgtctggatacaaaactgttggttattttgttaattgg

SEQ ID NO: 44247 - DNA, 44 bp, Emericella nidulans
gttctcgagacgagcgatcgcctaggacgacgggaagccagcct

SEQ ID NO: 44248 - DNA, 45 bp, Emericella nidulans
gaattcactgcggccgccatgccgcaaccaggatcgtcagtggat

SEQ ID NO: 44249 - DNA, 48 bp, Emericella nidulans
gttctcgagacgagcgatcgcttagaacctctcagccaagtcaccacc

SEQ ID NO: 44250 - DNA, 46 bp, Emericella nidulans
gaattcactgcggccgccatgtctctcaccagcaagctttccatca

SEQ ID NO: 44251 - DNA, 55 bp, Emericella nidulans
gttctcgagacgagcgatcgcttacttacttttctcagagagagcagcaacacca

SEQ ID NO: 44252 - DNA, 46 bp, Emericella nidulans
gaattcactgcggccgccatgagccaaatattgacagctccgcaag

SEQ ID NO: 44253 - DNA, 56 bp, Emericella nidulans
gttctcgagacgagcgatcgcttagctgaacacccgtacagagttatctgcgcatc

SEQ ID NO: 44254 - DNA, 48 bp, Emericella nidulans
gaattcactgcggccgccatggatactccgcctgaaatactccctgct

SEQ ID NO: 44255 - DNA, 48 bp, Emericella nidulans
gttctcgagacgagcgatcgctcaaacttggcagggtgacctttcctt

SEQ ID NO: 44256 - DNA, 54 bp, Emericella nidulans
gaattcactgcggccgccatgccagtcaccgagttctccttcaaagatccttac

SEQ ID NO: 44257 - DNA, 45 bp, Emericella nidulans
gttctcgagacgagcgatcgctcactgggccttccttggatcctt

SEQ ID NO: 44258 - DNA, 46 bp, Emericella nidulans
gaattcactgcggccgccatgtctaaccttcccgttgagcccgagt

SEQ ID NO: 44259 - DNA, 45 bp, Emericella nidulans
gttctcgagacgagcgatcgctcaccaccagtcaccctggtcctt

SEQ ID NO: 44260 - DNA, 48 bp, Emericella nidulans
gaattcactgcggccgccatgaatgaaaacgacgagaatggtccctca

SEQ ID NO: 44261 - DNA, 51 bp, Emericella nidulans
gttctcgagacgagcgatcgcctattcgttgtctttgatggagttgtacgg

SEQ ID NO: 44262 - DNA, 44 bp, Emericella nidulans
gaattcactgcggccgccatggcttctgccttccgctccagcct

SEQ ID NO: 44263 - DNA, 55 bp, Emericella nidulans
gttctcgagacgagcgatcgcctacagttgcttgataatcttctcaatgctctca

SEQ ID NO: 44264 - DNA, 47 bp, Emericella nidulans
gaattcactgcggccgccatggtcttgcaggatggctttcctatccc

SEQ ID NO: 44265 - DNA, 49 bp, Emericella nidulans
gttctcgagacgagcgatcgcctaaaattccctggtccgaatttccaga

SEQ ID NO: 44266 - DNA, 45 bp, Emericella nidulans
gaattcactgcggccgccatggacttcgccaagctgctggtagcc

SEQ ID NO: 44267 - DNA, 49 bp, Emericella nidulans
gttctcgagacgagcgatcgcctactccctcatctgacttttcggcaca

SEQ ID NO: 44268 - DNA, 47 bp, Emericella nidulans
gaattcactgcggccgccatgaccatgtccaggtcctcacgatcttc

SEQ ID NO: 44269 - DNA, 42 bp, Emericella nidulans
gttctcgagacgagcgatcgcggcaaagccgtcagcaacgac

SEQ ID NO: 44270 - DNA, 54 bp, Emericella nidulans
gaattcactgcggccgccatggctacgaattctttccgaaaactcactttttca

SEQ ID NO: 44271 - DNA, 46 bp, Emericella nidulans
gttctcgagacgagcgatcgctcactcctttttcgccgttcgaagt

SEQ ID NO: 44272 - DNA, 42 bp, Emericella nidulans
gaattcactgcggccgccatggccgcaagctcttccctcgac

SEQ ID NO: 44273 - DNA, 51 bp, Emericella nidulans
gttctcgagacgagcgatcgcttactcagaaagtccgaggttctcctcagc

SEQ ID NO: 44274 - DNA, 42 bp, Emericella nidulans
gaattcactgcggccgccatgtctcaggtcgacgcccagctt

SEQ ID NO: 44275 - DNA, 48 bp, Emericella nidulans
gttctcgagacgagcgatcgcttagagctttgaagcagtacccggaga

SEQ ID NO: 44276 - DNA, 42 bp, Emericella nidulans
gaattcactgcggccgccatgtccatcctcgccttggtcgaa

SEQ ID NO: 44277 - DNA, 50 bp, Emericella nidulans
gttctcgagacgagcgatcgcttaagcctcctcgacatactccttcgtca

SEQ ID NO: 44278 - DNA, 57 bp, Emericella nidulans
gaattcactgcggccgccatgtcttacattgaggaagaagaccagagatactgggac

SEQ ID NO: 44279 - DNA, 51 bp, Emericella nidulans
gttctcgagacgagcgatcgctcatgacttgaactgatcctctgtcacacc

SEQ ID NO: 44280 - DNA, 44 bp, Emericella nidulans
gaattcactgcggccgccatgttcgcccacccattcgatcattc

SEQ ID NO: 44281 - DNA, 55 bp, Emericella nidulans
gttctcgagacgagcgatcgcctagcagaggacagcctctagggcttctacatcg

SEQ ID NO: 44282 - DNA, 50 bp, Emericella nidulans
gaattcactgcggccgccatgtcctcagattcgactactcaggccgcttc

SEQ ID NO: 44283 - DNA, 51 bp, Emericella nidulans
gttctcgagacgagcgatcgctcacttgcgcttcctagaggacgacgagac

SEQ ID NO: 44284 - DNA, 46 bp, Emericella nidulans
gaattcactgcggccgccatggctacacttgcagcaccaccacctc

SEQ ID NO: 44285 - DNA, 44 bp, Emericella nidulans
gttctcgagacgagcgatcgcttaacgcatggtggcaggctttg

SEQ ID NO: 44286 - DNA, 46 bp, Emericella nidulans
gaattcactgcggccgccatggctaacactcctcacggtggtgtcc

SEQ ID NO: 44287 - DNA, 50 bp, Emericella nidulans
gttctcgagacgagcgatcgcctacagacgctcaaagtagccctcgctct

SEQ ID NO: 44288 - DNA, 44 bp, Emericella nidulans
gaattcactgcggccgccatgcgcgaggtcaacttcagcatccc

SEQ ID NO: 44289 - DNA, 41 bp, Emericella nidulans
gttctcgagacgagcgatcgctcatggcgtggcgcaccagt

SEQ ID NO: 44290 - DNA, 46 bp, Emericella nidulans
gaattcactgcggccgccatggccagcatgaatcaacctcaaccgt

SEQ ID NO: 44291 - DNA, 45 bp, Emericella nidulans
gttctcgagacgagcgatcgctcattgctgcagcccaagaggaac

SEQ ID NO: 44292 - DNA, 46 bp, Emericella nidulans
gaattcactgcggccgccatgtacctctccacggtcctcttcccac

SEQ ID NO: 44293 - DNA, 50 bp, Emericella nidulans
gttctcgagacgagcgatcgcctaagaatcccaaacatcaaccccgtcca

SEQ ID NO: 44294 - DNA, 47 bp, Emericella nidulans
gaattcactgcggccgccatgtctggttaccagagaaccccacaagc

SEQ ID NO: 44295 - DNA, 51 bp, Emericella nidulans
gttctcgagacgagcgatcgcctagtgtccctgggggtaatcagactgaga

SEQ ID NO: 44296 - DNA, 48 bp, Emericella nidulans
gaattcactgcggccgccatgccaacttccatatctaccgctcccctc

SEQ ID NO: 44297 - DNA, 53 bp, Emericella nidulans
gttctcgagacgagcgatcgcttactgtcatgaacgttgtgagcgactcatcg

SEQ ID NO: 44298 - DNA, 45 bp, Emericella nidulans
gaattcactgcggccgccatggctgctgttatcacgctccagtcg

SEQ ID NO: 44299 - DNA, 45 bp, Emericella nidulans
gttctcgagacgagcgatcgcttacatcggagcaacagccgcatc

SEQ ID NO: 44300 - DNA, 47 bp, Emericella nidulans
gaattcactgcggccgccatggctactagtatcaccgccggcctaca

SEQ ID NO: 44301 - DNA, 46 bp, Emericella nidulans
gttctcgagacgagcgatcgcttagaacgcaaccgtcgaagccaat

SEQ ID NO: 44302 - DNA, 47 bp, Emericella nidulans
gaattcactgcggccgccatggacgactcggcactaccttcaaacac

SEQ ID NO: 44303 - DNA, 51 bp, Emericella nidulans
gttctcgagacgagcgatcgctcactcagatctgttttcaagaacggtgtc

SEQ ID NO: 44304 - DNA, 44 bp, Emericella nidulans
gaattcactgcggccgccatgtcctccacagcgcatccgacgaa

SEQ ID NO: 44305 - DNA, 45 bp, Emericella nidulans
gttctcgagacgagcgatcgcttacccatgcatccacccaccatc

SEQ ID NO: 44306 - DNA, 51 bp, Emericella nidulans
gaattcactgcggccgccatggagaatgtacaatcgagaatgcagggatcg

SEQ ID NO: 44307 - DNA, 53 bp, Emericella nidulans
gttctcgagacgagcgatcgcctaaacatcacggacacgggtctgtttcttcg

SEQ ID NO: 44308 - DNA, 45 bp, Emericella nidulans
gaattcactgcggccgccatgcagtcgcgtttagtgtcgcaaagc

SEQ ID NO: 44309 - DNA, 46 bp, Emericella nidulans
gttctcgagacgagcgatcgctcaagcaccaatggcgttcttaacc

SEQ ID NO: 44310 - DNA, 46 bp, Emericella nidulans
gaattcactgcggccgccatggttagggcgacgtgttcatgtgtca

SEQ ID NO: 44311 - DNA, 51 bp, Emericella nidulans
gttctcgagacgagcgatcgctcaacgttgataccgcggtaatagctcgtc

SEQ ID NO: 44312 - DNA, 48 bp, Emericella nidulans
gaattcactgcggccgccatggctactgactggcaacccgagtgtatg

SEQ ID NO: 44313 - DNA, 49 bp, Emericella nidulans
gttctcgagacgagcgatcgcctagacagcctcaaccgcagtatgttca

SEQ ID NO: 44314 - DNA, 46 bp, Emericella nidulans
gaattcactgcggccgccatgaggtctctcatctctgtggccgttc

SEQ ID NO: 44315 - DNA, 52 bp, Emericella nidulans
gttctcgagacgagcgatcgcctaagcaataacatcctgcttcctgtcaagg

SEQ ID NO: 44316 - DNA, 49 bp, Emericella nidulans
gaattcactgcggccgccatgactccgtccacatcacatatttcgagcc

SEQ ID NO: 44317 - DNA, 49 bp, Emericella nidulans
gttctcgagacgagcgatcgctcacgccatatcttcttcatcctcttca

SEQ ID NO: 44318 - DNA, 42 bp, Emericella nidulans
gaattcactgcggccgccatggacgaggccccatcaacaccc

SEQ ID NO: 44319 - DNA, 52 bp, Emericella nidulans
gttctcgagacgagcgatcgcctaaaacgtcatccacccctctttcatatcc

SEQ ID NO: 44320 - DNA, 45 bp, Emericella nidulans
gaattcactgcggccgccatgagtagcgatacccgccaaacctcc

SEQ ID NO: 44321 - DNA, 48 bp, Emericella nidulans
gttctcgagacgagcgatcgcttacctatctgtcccatcaagcgaggc

SEQ ID NO: 44322 - DNA, 41 bp, Emericella nidulans
gaattcactgcggccgccatgtgctggaaccccgcatgctc

SEQ ID NO: 44323 - DNA, 52 bp, Emericella nidulans; identical to SEQ ID NO: 43951

SEQ ID NO: 44324 - DNA, 48 bp, Emericella nidulans
gaattcactgcggccgccatggccactctctcttcactccgtcatctc

SEQ ID NO: 44325 - DNA, 49 bp, Emericella nidulans
gttctcgagacgagcgatcgctcaatacctctccacaagccacttcctg

SEQ ID NO: 44326 - DNA, 46 bp, Emericella nidulans
gaattcactgcggccgccatgccaggaattctccccatgaaagtga

SEQ ID NO: 44327 - DNA, 43 bp, Emericella nidulans
gttctcgagacgagcgatcgcctagacggccagccgtcgatcc

SEQ ID NO: 44328 - DNA, 49 bp, Emericella nidulans
gaattcactgcggccgccatgagctcttcagatgatgataccccactcg

SEQ ID NO: 44329 - DNA, 51 bp, Emericella nidulans
gttctcgagacgagcgatcgctcaaaactcccagttctcatcgacggactt

SEQ ID NO: 44330 - DNA, 43 bp, Emericella nidulans
gaattcactgcggccgccatgtctgggttgactctcgggggtg

SEQ ID NO: 44331 - DNA, 51 bp, Emericella nidulans
gttctcgagacgagcgatcgcctacaaactcatcgtcaaccactcccattc

SEQ ID NO: 44332 - DNA, 48 bp, Emericella nidulans
gaattcactgcggccgccatggacgatgagagatcgaatccggggaaa

SEQ ID NO: 44333 - DNA, 51 bp, Emericella nidulans
gttctcgagacgagcgatcgcctagacctgtgattccagcagatcagcata

SEQ ID NO: 44334 - DNA, 45 bp, Emericella nidulans
gaattcactgcggccgccatgagttcaccgctccgtcagagcaca

SEQ ID NO: 44335 - DNA, 45 bp, Emericella nidulans
gttctcgagacgagcgatcgcttacctggctgcctgaggtctcct

SEQ ID NO: 44336 - DNA, 44 bp, Emericella nidulans
gaattcactgcggccgccatgggggaaaagctcgacccggaact

SEQ ID NO: 44337 - DNA, 46 bp, Emericella nidulans
gttctcgagacgagcgatcgcctatcgctgaaaactgccggggaaa

SEQ ID NO: 44338 - DNA, 41 bp, Emericella nidulans
gaattcactgcggccgccatgtcaatccttgtgcggccacc

SEQ ID NO: 44339 - DNA, 44 bp, Emericella nidulans
gttctcgagacgagcgatcgctcacatcggctgcccatccaaat

SEQ ID NO: 44340 - DNA, 41 bp, Emericella nidulans; identical to SEQ ID NO: 44338

SEQ ID NO: 44341 - DNA, 44 bp, Emericella nidulans; identical to SEQ ID NO: 44339

SEQ ID NO: 44342 - DNA, 42 bp, Emericella nidulans
gaattcactgcggccgccatggcctaccacggctctggtccc

SEQ ID NO: 44343 - DNA, 43 bp, Emericella nidulans
gttctcgagacgagcgatcgcccgacgggcgaagcagcagaga

SEQ ID NO: 44344 - DNA, 42 bp, Emericella nidulans; identical to SEQ ID NO: 44342

SEQ ID NO: 44345 - DNA, 43 bp, Emericella nidulans
gttctcgagacgagcgatcgcttaccgacgggcgaagcagcag
